(19) United States
(12) Patent Application Publication
(10) Pub. No.: US 2003/0171311 A1
(43) Pub. Date: Sep. 11, 2003

(54) Enzymatic nucleic acid treatment of diseases or conditions related to hepatitis C virus infection

(76) Inventors: Lawrence Blatt, Boulder, CO (US); James McSwiggen, Boulder, CO (US); Elisabeth Roberts, Federal Heights, CO (US); Pamela A. Pavco, Lafayette, CO (US); Dennis MacJack, Arvada, CO (US)

Correspondence Address: MCDONNELL BOEHNEN HULBERT & BERGHOFF, 300 SOUTH WACKER DRIVE, SUITE 3200, CHICAGO, IL, 60606, US

(21) Appl. No.: 09/817,879

(22) Filed: Mar. 26, 2001

Related U.S. Application Data
(63) Continuation-in-part of application No. 09/740,332, filed on Dec. 18, 2000.
Application No. 09/740,332 is a continuation-in-part of application No. 09/611,931, filed on Jul. 7, 2000.
Application No. 09/611,931 is a continuation-in-part of application No. 09/504,231, filed on Feb. 15, 2000.
Application No. 09/504,231 is a continuation-in-part of application No. 09/274,553, filed on Mar. 23, 1999.
Application No. 09/274,553 is a continuation-in-part of application No. 09/257,608, filed on Feb. 25, 1999, now abandoned.
(60) Provisional application No. 60/100,842, filed on Sep. 18, 1998.
(60) Provisional application No. 60/083,217, filed on Apr. 27, 1998.

(51) Int. Cl. A61K 48/00; C07H 21/04

(52) U.S. Cl. 514/44; 536/23.1

(57) ABSTRACT

The present invention relates to compounds, including enzymatic nucleic acid molecules, ribozymes, DNAzymes, nuclease activating compounds and chimeras such as 2′,5′-adenylates, that modulate the expression and/or replication of hepatitis C virus (HCV).

[0001] This patent application is a continuation-in-part of Blatt et al., U.S. Ser. No. (09/740,332), filed Dec. 18, 2000, which is a continuation-in-part of Blatt et al., U.S. Ser. No. (09/611,931), filed Jul. 7, 2000, which is a continuation-in-part of Blatt et al., Ser. No. 09/504,321, filed Feb. 15, 2000, which is a continuation-in-part of Blatt et al., U.S. Ser. No. 09/274,553, filed Mar. 23, 1999, which is a continuation-in-part of Blatt et al., U.S. Ser. No. 09/257,608, filed Feb. 24, 1999 (abandoned), which claims priority from Blatt et al., U.S. Ser. No. 60/100,842, filed Sep. 18, 1998, and McSwiggen et al., U.S. Ser. No. 60/083,217 filed Apr. 27, 1998, all of these earlier applications are entitled “ENZYMATIC NUCLEIC ACID TREATMENT OF DISEASES OR CONDITIONS RELATED TO HEPATITIS C VIRUS INFECTION”. Each of these applications are hereby incorporated by reference herein in their entirety including the drawings.

[0002] The Sequence Listing file named “MBHBOO-80sequenceListing.ST25” submitted on Compact Disc-Recordable (CD-R) medium (“010323_{—}1557”) in compliance with 37 C.F.R. §1.52(e) is incorporated herein by reference.

### TECHNICAL FIELD OF THE INVENTION

[0003] This invention relates to methods and reagents for the treatment of diseases or conditions relating to the hepatitis C virus infection.

### BACKGROUND OF THE INVENTION

[0004] The following is a discussion of relevant art, none of which is admitted to be prior art to the present invention.

[0005] In 1989, the Hepatitis C Virus (HCV) was determined to be an RNA virus and was identified as the causative agent of most non-A non-B viral Hepatitis (Choo et al., Science. 1989; 244:359-362). Unlike retroviruses such as HIV, HCV does not have a DNA replication phase and no integrated forms of the viral genome into the host chromosome have been detected (Houghton et al., Hepatology 1991;14:381-388). Rather, replication of the coding (plus) strand is mediated by the production of a replicative (minus) strand leading to the generation of several copies of plus strand HCV RNA. The genome consists of a single, large, open-reading frame that is translated into a polyprotein (Kato et al., FEBS Letters. 1991; 280: 325-328). This polyprotein subsequently undergoes post-translational cleavage, producing several viral proteins (Leinbach et al., Virology. 1994: 204:163-169).

[0006] Examination of the 9.5-kilobase genome of HCV has demonstrated that the viral nucleic acid can mutate at a high rate (Smith et al., Mol. Evol 1997 45:238-246). This rate of mutation has led to the evolution of several distinct genotypes of HCV that share approximately 70% sequence identity (Simmonds et al., J. Gen. Virol. 1994; 75 :1053-1061). It is important to note that these sequences are evolutionarily quite distant. For example, the genetic identity between humans and primates such as the chimpanzee is approximately 98%. In addition, it has been demonstrated that an HCV infection in an individual patient is composed of several distinct and evolving quasispecies that have 98% identity at the RNA level. Thus, the HCV genome is hypervariable and continuously changing. Although the HCV genome is hypervariable, there are 3 regions of the genome that are highly conserved. These conserved sequences occur in the 5′ and 3′ non-coding regions as well as the 5′-end of the core protein coding region and are thought to be vital for HCV RNA replication as well as translation of the HCV polyprotein. Thus, therapeutic agents that target these conserved HCV genomic regions can have a significant impact over a wide range of HCV genotypes. Moreover, it is unlikely that drug resistance will occur with enzymatic nucleic acids specific to conserved regions of the HCV genome. In contrast, therapeutic modalities that target inhibition of enzymes such as the viral proteases or helicase are likely to result in the selection for drug resistant strains since the RNA for these viral encoded enzymes is located in the hypervariable portion of the HCV genome.

[0007] After initial exposure to HCV, the patient will experience a transient rise in liver enzymes, which indicates that inflammatory processes are occurring (Alter et al., IN: Seeff LB, Lewis JH, eds. Current Perspectives in Hepatology. New York: Plenum Medical Book Co; 1989:83-89). This elevation in liver enzymes will occur at least 4 weeks after the initial exposure and can last for up to two months (Farci et al., New England Journal of Medicine. 1991:325:98-104). Prior to the rise in liver enzymes, it is possible to detect HCV RNA in the patient's serum using RT-PCR analysis (Takahashi et al., American Journal of Gastroenterology. 1993:88:2:240-243). This stage of the disease is called the acute stage and usually goes undetected since 75% of patients with acute viral hepatitis from HCV infection are asymptomatic. The remaining 25% of these patients develop jaundice or other symptoms of hepatitis.

[0008] Acute HCV infection is a benign disease, however, and as many as 80% of acute HCV patients progress to chronic liver disease as evidenced by persistent elevation of serum alanine aminotransferase (ALT) levels and by continual presence of circulating HCV RNA (Sherlock, Lancet 1992; 339:802). The natural progression of chronic HCV infection over a 10 to 20 year period leads to cirrhosis in 20 to 50% of patients (Davis et al., Infectious Agents and Disease 1993;2:150:154) and progression of HCV infection to hepatocellular carcinoma has been well documented (Liang et al., Hepatology. 1993; 18:1326-1333; Tong et al., Western Journal of Medicine, 1994; Vol. 160, No. 2: 133-138). There have been no studies that have determined sub-populations that are most likely to progress to cirrhosis and/or hepatocellular carcinoma, thus all patients have equal risk of progression.

[0009] It is important to note that the survival for patients diagnosed with hepatocellular carcinoma is only 0.9 to 12.8 months from initial diagnosis (Takahashi et al., American Journal of Gastroenterology. 1993:88:2:240-243). Treatment of hepatocellular carcinoma with chemotherapeutic agents has not proven effective and only 10% of patients will benefit from surgery due to extensive tumor invasion of the liver (Trinchet et al., Presse Medicine. 1994:23:831-833). Given the aggressive nature of primary hepatocellular carcinoma, the only viable treatment alternative to surgery is liver transplantation (Pichlmayr et al., Hepatology. 1994:20:33S-40S).

[0010] Upon progression to cirrhosis, patients with chronic HCV infection present with clinical features, which are common to clinical cirrhosis regardless of the initial cause (D'Amico et al., Digestive Diseases and Sciences. 1986;31:5: 468-475). These clinical features can include: bleeding esophageal varices, ascites, jaundice, and encephalopathy (Zakim D, Boyer TD. Hepatology a textbook of liver disease. Second Edition Volume 1. 1990 W.B. Saunders Company. Philadelphia). In the early stages of cirrhosis, patients are classified as compensated meaning that although liver tissue damage has occurred, the patient's liver is still able to detoxify metabolites in the blood-stream. In addition, most patients with compensated liver disease are asymptomatic and the minority with symptoms report only minor symptoms such as dyspepsia and weakness. In the later stages of cirrhosis, patients are classified as decompensated meaning that their ability to detoxify metabolites in the bloodstream is diminished and it is at this stage that the clinical features described above will present.

[0011] In 1986, D'Amico et al. described the clinical manifestations and survival rates in 1155 patients with both alcoholic and viral associated cirrhosis (D'Amico supra). Of the 1155 patients, 435 (37%) had compensated disease although 70% were asymptomatic at the beginning of the study. The remaining 720 patients (63%) had decompensated liver disease with 78% presenting with a history of ascites, 31% with jaundice, 17% had bleeding and 16% had encephalopathy. Hepatocellular carcinoma was observed in six (0.5%) patients with compensated disease and in 30 (2.6%) patients with decompensated disease.

[0012] Over the course of six years, the patients with compensated cirrhosis developed clinical features of decompensated disease at a rate of 10% per year. In most cases, ascites was the first presentation of decompensation. In addition, hepatocellular carcinoma developed in 59 patients who initially presented with compensated disease by the end of the six-year study.

[0013] With respect to survival, the D'Amico study indicated that the five-year survival rate for all patients on the study was only 40%. The six-year survival rate for the patients who initially had compensated cirrhosis was 54% while the six-year survival rate for patients who initially presented with decompensated disease was only 21%. There were no significant differences in the survival rates between the patients who had alcoholic cirrhosis and the patients with viral related cirrhosis. The major causes of death for the patients in the D'Amico study were liver failure in 49%; hepatocellular carcinoma in 22%; and, bleeding in 13% (D'Amico supra).

[0014] Chronic Hepatitis C is a slowly progressing inflammatory disease of the liver, mediated by a virus (HCV) that can lead to cirrhosis, liver failure and/or hepatocellular carcinoma over a period of 10 to 20 years. In the US, it is estimated that infection with HCV accounts for 50,000 new cases of acute hepatitis in the United States each year (NIH Consensus Development Conference Statement on Management of Hepatitis C March 1997). The prevalence of HCV in the United States is estimated at 1.8% and the CDC places the number of chronically infected Americans at approximately 4.5 million people. The CDC also estimates that up to 10,000 deaths per year are caused by chronic HCV infection. The prevalence of HCV in the United States is estimated at 1.8% and the CDC places the number of chronically infected Americans at approximately 4.5 million people. The CDC also estimates that up to 10,000 deaths per year are caused by chronic HCV infection.

[0015] Numerous well controlled clinical trials using interferon (IFN-alpha) in the treatment of chronic HCV infection have demonstrated that treatment three times a week results in lowering of serum ALT values in approximately 50% (range 40% to 70%) of patients by the end of 6 months of therapy (Davis et al., New England Journal of Medicine 1989; 321:1501-1506; Marcellin et al., Hepatology. 1991; 13:393-397; Tong et al., Hepatology 1997:26:747-754; Tong et al., Hepatology 1997 26(6): 1640-1645). However, following cessation of interferon treatment, approximately 50% of the responding patients relapsed, resulting in a “durable” response rate as assessed by normalization of serum ALT concentrations of approximately 20 to 25%.

[0016] In recent years, direct measurement of the HCV RNA has become possible through use of either the branched-DNA or Reverse Transcriptase Polymerase Chain Reaction (RT-PCR) analysis. In general, the RT-PCR methodology is more sensitive and leads to more accurate assessment of the clinical course (Tong et al., supra). Studies that have examined six months of type 1 interferon therapy using changes in HCV RNA values as a clinical endpoint have demonstrated that up to 35% of patients will have a loss of HCV RNA by the end of therapy (Marcellin et al., supra). However, as with the ALT endpoint, about 50% of the patients relapse six months following cessation of therapy resulting in a durable virologic response of only 12% (Marcellin et al., supra). Studies that have examined 48 weeks of therapy have demonstrated that the sustained virological response is up to 25% (NIH consensus statement: 1997). Thus, standard of care for treatment of chronic HCV infection with type 1 interferon is now 48 weeks of therapy using changes in HCV RNA concentrations as the primary assessment of efficacy (Hoofnagle et al., New England Journal of Medicine 1997; 336(5) 347-356).

[0017] Side effects resulting from treatment with type 1 interferons can be divided into four general categories, which include 1. Influenza-like symptoms; 2. Neuropsychiatric; 3. Laboratory abnormalities; and, 4. Miscellaneous (Dusheiko et al., Journal of Viral Hepatitis. 1994:1:3-5). Examples of influenza-like symptoms include; fatigue, fever; myalgia; malaise; appetite loss; tachycardia; rigors; headache and arthralgias. The influenza-like symptoms are usually short-lived and tend to abate after the first four weeks of dosing (Dushieko et al., supra). Neuropsychiatric side effects include: irritability, apathy; mood changes; insomnia; cognitive changes and depression. The most important of these neuropsychiatric side effects is depression and patients who have a history of depression should not be given type 1 interferon. Laboratory abnormalities include; reduction in myeloid cells including granulocytes, platelets and to a lesser extent red blood cells. These changes in blood cell counts rarely lead to any significant clinical sequellae (Dushieko et al., supra). In addition, increases in triglyceride concentrations and elevations in serum alanine and aspartate aminotransferase concentration have been observed. Finally, thyroid abnormalities have been reported. These thyroid abnormalities are usually reversible after cessation of interferon therapy and can be controlled with appropriate medication while on therapy. Miscellaneous side effects include nausea; diarrhea; abdominal and back pain; pruritus; alopecia; and rhinorrhea. In general, most side effects will abate after 4 to 8 weeks of therapy (Dushieko et al, supra).

[0018] Type 1 Interferon is a key constituent of many treatment programs for chronic HCV infection. Treatment with type 1 interferon induces a number of genes and results in an antiviral state within the cell. One of the genes induced is 2′, 5′ oligoadenylate synthetase, an enzyme that synthesizes short 2′, 5′ oligoadenylate (2-5A) molecules. Nascent 2-5A subsequently activates a latent RNase, RNase L, which in turn nonspecifically degrades viral RNA.

[0019] Welch et al., Gene Therapy 1996 3(11): 994-1001 describe in vitro an in vivo studies with two vector expressed hairpin ribozymes targeted against hepatitis C virus.

[0020] Sakamoto et al., J. Clinical Investigation 1996 98(12): 2720-2728 describe intracellular cleavage of hepatitis C virus RNA and inhibition of viral protein translation by certain vector expressed hammerhead ribozymes.

[0021] Lieber et al., J. Virology 1996 70(12): 8782-8791 describe elimination of hepatitis C virus RNA in infected human hepatocytes by adenovirus-mediated expression of certain hammerhead ribozymes.

[0022] Ohkawa et al., 1997, J. Hepatology, 27; 78-84, describe in vitro cleavage of HCV RNA and inhibition of viral protein translation using certain in vitro transcribed hammerhead ribozymes.

[0023] Barber et al., International PCT Publication No. WO 97/32018, describe the use of an adenovirus vector to express certain anti-hepatitis C virus hairpin ribozymes.

[0024] Kay et al., International PCT Publication No. WO 96/18419, describe certain recombinant adenovirus vectors to express anti-HCV hammerhead ribozymes.

[0025] Yamada et al., Japanese Patent Application No. JP 07231784 describe a specific poly-(L)-lysine conjugated hammerhead ribozyme targeted against HCV.

[0026] Draper, U.S. Pat. Nos. 5,610,054 and 5,869,253, describes enzymatic nucleic acid molecules capable of inhibiting replication of HCV.

[0027] Macejak et al., 2000, Hepatology, 31, 769-776, describe enzymatic nucleic acid molecules capable of inhibiting replication of HCV.

[0028] Weifeng and Torrence, 1997, Nucleosides and Nucleotides, 16, 7-9, describe the synthesis of 2-5A antisense chimeras with various non-nucleoside components.

[0029] Torrence et al, U.S. Pat. No. 5,583,032 describe targeted cleavage of RNA using an antisense oligonucleotide linked to a 2′,5′-oligoadenylate activator of RNase L.

[0030] Suhadolnik and Pfleiderer, U.S. Pat. Nos. 5,863,905; 5,700,785; 5,643,889; 5,556,840; 5,550,111; 5,405,939; 5,188,897; 4,924,624; and 4,859,768 describe specific internucleotide phosphorothioate 2′,5′-oligoadenlyates and 2′,5′-oligoadenlyate conjugates.

[0031] Budowsky et al., U.S. Pat. No. 5,962,431 describe a method of treating papillomavirus using specific 2′,5′-oligoadenylates.

[0032] Torrence et al., International PCT publication No. WO 00/14219, describe specific peptide nucleic acid 2′,5′-oligoadenylate chimeric molecules.

[0033] Stinchcomb et al., U.S. Pat. No. 5,817,796, describe C-myb ribozymes having 2′-5′-Linked Adenylate Residues.

### SUMMARY OF THE INVENTION

[0034] This invention relates to enzymatic nucleic acid molecules directed to cleave RNA species of hepatitis C virus (HCV) and/or encoded by the HCV. In particular, applicant describes the selection and function of enzymatic nucleic acid molecules capable of specifically cleaving HCV RNA. The invention further relates to compounds and chimeric molecules comprising nuclease activating activity. The invention also relates to compositions and methods for the cleavage of RNA using these nuclease activating compounds and chimeras. Nucleic acid molecules, nuclease activating compounds and chimeras, and compositions and methods of the invention can be used to treat diseases associated with HCV infection.

[0035] Due to the high sequence variability of the HCV genome, selection of nucleic acid molecules and nuclease activating compounds and chimeras for broad therapeutic applications would likely involve the conserved regions of the HCV genome. Specifically, the present invention describes nucleic acid molecules that cleave the conserved regions of the HCV genome. The invention further describes compounds and chimeric molecules that activate cellular nucleases that cleave HCV RNA, including conserved regions of the HCV genome. Examples of conserved regions of the HCV genome include but are not limited to the 5′-Non Coding Region (NCR), the 5′-end of the core protein coding region, and the 3′-NCR. HCV genomic RNA contains an internal ribosome entry site (IRES) in the 5′-NCR which mediates translation independently of a 5′-cap structure (Wang et al., 1993, J. Virol., 67, 3338-44). The full-length sequence of the HCV RNA genome is heterologous among clinically isolated subtypes, of which there are at least 15 (Simmonds, 1995, Hepatology, 21, 570-583), however, the 5′-NCR sequence of HCV is highly conserved across all known subtypes, most likely to preserve the shared IRES mechanism (Okamoto et al., 1991, J. General Virol., 72, 2697-2704) In general, enzymatic nucleic acid molecules and nuclease activating compounds, and chimeras that cleave sites located in the 5′ end of the HCV genome are expected to block translation while nucleic acid molecules and nuclease activating compounds, and chimeras that cleave sites located in the 3′ end of the genome would be expected to block RNA replication. Therefore, one nucleic acid molecule, compound, or chimera can be designed to cleave all the different isolates of HCV. Enzymatic nucleic acid molecules and nuclease activating compounds, and chimeras designed against conserved regions of various HCV isolates can enable efficient inhibition of HCV replication in diverse patient populations and can ensure the effectiveness of the nucleic acid molecules and nuclease activating compounds, and chimeras against HCV quasi species which evolve due to mutations in the non-conserved regions of the HCV genome.

[0036] In one embodiment, the invention features the use of an enzymatic nucleic acid molecule, preferably in the hammerhead, NCH (Inozyme), G-cleaver, amberzyme, zinzyme and/or DNAzyme motif, to inhibit the expression of HCV RNA.

[0037] In another embodiment, the invention features the use of an enzymatic nucleic acid molecule, preferably in the hammerhead, Inozyme, G-cleaver, amberzyme, zinzyme and/or DNAzyme motif, to inhibit the expression of HCV minus strand RNA.

[0038] In yet another embodiment, the invention features the use of a nuclease activating compound and/or a chimera to inhibit the expression of HCV RNA.

[0039] In another embodiment, the invention features the use of a nuclease activating compound and/or a chimera to inhibit the expression of HCVminus strand RNA.

[0040] By “inhibit” it is meant that the activity of HCV or level of RNAs or equivalent RNAs encoding one or more protein subunits of HCV is reduced below that observed in the absence of the nucleic acid molecules, nuclease activating compounds, and chimeras of the invention. In one embodiment, inhibition with an enzymatic nucleic acid molecule is below that level observed in the presence of an enzymatically inactive or attenuated molecule that is able to bind to the same site on the target RNA, but is unable to cleave that RNA. In another embodiment, inhibition of HCV genes with the nucleic acid molecule, nuclease activating compound, or chimera of the instant invention is greater than in the presence of the nucleic acid molecule, nuclease activating compound, or chimera than in its absence.

[0041] In one embodiment, the invention features a compound having formula I:

[chemical structure]

[0042] wherein X₁ is an integer of 1, 2, or 3; X₂ is an integer greater than or equal to 1; R₆ independently represents a 3′-ribofuranose sugar moiety, for example, H, OH, NH₂, O NH₂, alkyl, S-alkyl, O-alkyl, O-alkyl-S-alkyl, O-alkoxyalkyl, allyl, O-allyl, or fluoro; each R₁ and R₂ independently represent non-bridging phosphate moiety, for example, O, alkyl, O-alkyl, or S; each R₃ R₄ and R₈ independently represent a bridging phosphate moiety, for example, O, N, alkyl, fluoroalkyl, or S; and R₅ represents an alkyl or alkylamine group, or an oligonucleotide comprising any of SEQ ID NOS. 4798-9637, an oligonucleotide having a sequence complementary to a sequence comprising SEQ ID NOS. 1-4556, or abasic moiety.

[0043] In another embodiment, the abasic moiety of the instant invention preferably includes:

[chemical structure]

[0044] wherein R₈ is R₈ shown in Formula I and R₇ independently represents a ribofuranose sugar moiety, for example, H, OH, NH2, O—NH2, alkyl, S-alkyl, O-alkyl, O-alkyl-S-alkyl, O-alkoxyalkyl, allyl, O-allyl, fluoro, oligonucleotide, alkyl, alkylamine or abasic moiety.

[0045] In another embodiment, the oligonucleotide R₅ of Formula I having a sequence complementary to a sequence comprising SEQ ID NOs. 1-4556 is an enzymatic nucleic acid molecule.

[0046] In yet another embodiment, the oligonucleotide R₅ of Formula I having a sequence complementary to a sequence comprising SEQ ID NOs. 1-4556 is an antisense nucleic acid molecule.

[0047] In another embodiment, the oligonucleotide R₅ of Formula I having a sequence complementary to a sequence comprising SEQ ID NOs. 1-4556 is an enzymatic nucleic acid molecule selected from the group consisting of Hammerhead, Inozyme, G-cleaver, DNAzyme, Amberzyme, and Zinzyme motifs.

[0048] In another embodiment, the Inozyme enzymatic nucleic acid molecule of the instant invention comprises a stem II region of length greater than or equal to 2 base pairs.

[0049] In one embodiment, the oligonucleotide R₅ of Formula I having a sequence complementary to a sequence comprising SEQ ID NOs. 1-4556 is an enzymatic nucleic acid comprising between 12 and 100 bases complementary to an RNA derived from HCV.

[0050] In another embodiment, the oligonucleotide R₅ of Formula I having a sequence complementary to a sequence comprising SEQ ID NOs. 1-4556 is an enzymatic nucleic acid comprising between 14 and 24 bases complementary to said RNA derived from HCV.

[0051] In one embodiment, the oligonucleotide R₅ of Formula I having a sequence complementary to a sequence comprising SEQ ID NOs. 1-4556 is an antisense nucleic acid comprising between 12 and 100 bases complementary to an RNA derived from HCV.

[0052] In another embodiment, the oligonucleotide R₅ of Formula I having a sequence complementary to a sequence comprising SEQ ID NOs. 1-4556 is an antisense nucleic acid comprising between 14 and 24 bases complementary to said RNA derived from HCV.

[0053] In another embodiment, the invention features a pharmaceutical composition comprising a compound of Formula I, in a pharmaceutically acceptable carrier.

[0054] In yet another embodiment, the invention features a mammalian cell comprising a compound of Formula I. For example, the mammalian cell comprising a compound of Formula I is a human cell.

[0055] In one embodiment, the invention features a method for treatment of cirrhosis, liver failure or hepatocellular carcinoma comprising the step of administering to a patient a compound of Formula I under conditions suitable for said treatment.

[0056] In another embodiment, the invention features a method of treatment of a patient having a condition associated with HCV infection comprising contacting cells of said patient with a compound having Formula I, and further comprising contacting the cells with one or more other therapeutic compounds under conditions suitable for said treatment. Other therapeutic compounds include, for example, type I interferon, interferon alpha, interferon beta, consensus interferon, polyethylene glycol interferon, polyethylene glycol interferon alpha 2a, polyethylene glycol interferon alpha 2b, polyethylene glycol consensus interferon, treatment with an enzymatic nucleic acid molecule, and treatment with an antisense molecule.

[0057] In one embodiment of the inventive method, the other therapeutic compounds, for example, type I interferon, interferon alpha, interferon beta, consensus interferon, polyethylene glycol interferon, polyethylene glycol interferon alpha 2a, polyethylene glycol interferon alpha 2b, polyethylene glycol consensus interferon, treatment with an enzymatic nucleic acid molecule, and treatment with an antisense nucleic acid molecule, and the compound having Formula I are administered separately in separate pharmaceutically acceptable carriers.

[0058] In another embodiment, the other therapeutic compounds, for example, type I interferon, interferon alpha, interferon beta, consensus interferon, polyethylene glycol interferon, polyethylene glycol interferon alpha 2a, polyethylene glycol interferon alpha 2b, polyethylene glycol consensus interferon, treatment with an enzymatic nucleic acid molecule, and treatment with an antisense nucleic acid molecule, and the compound having Formula I are administered simultaneously in a pharmaceutically acceptable carrier.

[0059] In yet another embodiment, the invention features a method for inhibiting HCV replication in a mammalian cell comprising the step of administering to said cell a compound having Formula I under conditions suitable for said inhibition.

[0060] In another embodiment, the invention features a method of cleaving a separate RNA molecule comprising, contacting a compound having Formula I with the separate RNA molecule under conditions suitable for the cleavage of the separate RNA molecule. In one example, the method of cleaving a separate RNA molecule is carried out in the presence of a divalent cation, for example Mg2+.

[0061] In yet another embodiment, the method of cleaving a separate RNA molecule of the invention is carried out in the presence of a protein nuclease, for example, RNAse L.

[0062] In one embodiment, a compound having Formula I is chemically synthesized. Additionally, a compound having Formula I comprises at least one 2′-sugar modification, at least one nucleic acid base modification, and/or at least one phosphate modification.

[0063] By “enzymatic nucleic acid molecule” it is meant a nucleic acid molecule which has complementarity in a substrate binding region to a specified gene target, and also has an enzymatic activity which is active to specifically cleave target RNA. That is, the enzymatic nucleic acid molecule is able to intermolecularly cleave RNA and thereby inactivate a target RNA molecule. These complementary regions allow sufficient hybridization of the enzymatic nucleic acid molecule to the target RNA and thus permit cleavage. One hundred percent complementarity is preferred, but complementarity as low as 50-75% can also be useful in this invention. The nucleic acids can be modified at the base, sugar, and/or phosphate groups. The term enzymatic nucleic acid is used interchangeably with phrases such as enzymatic nucleic acids, catalytic RNA, enzymatic RNA, catalytic DNA, aptazyme or aptamer-binding enzymatic nucleic acid, regulatable enzymatic nucleic acid, allosteric catalytic nucleic acid, allosteric enzymatic nucleic acid, allosteric ribozyme, catalytic oligonucleotides, nucleozyme, DNAzyme, RNA enzyme, endoribonuclease, endonuclease, minizyme, leadzyme, oligozyme or DNA enzyme. All of these terminologies describe nucleic acid molecules with enzymatic activity. The specific enzymatic nucleic acid molecules described in the instant application are not meant to be limiting and those skilled in the art will recognize that all that is important in an enzymatic nucleic acid molecule of this invention is that it have a specific substrate binding site which is complementary to one or more of the target nucleic acid regions, and that it have nucleotide sequences within or surrounding that substrate binding site which impart a nucleic acid cleaving activity to the molecule (Cech et al., U.S. Pat. No. 4,987,071; Cech et al., 1988, JAMA).

[0064] By “nucleic acid molecule” as used herein is meant a molecule having nucleotides. The nucleic acid can be single, double, or multiple stranded and can comprise modified or unmodified nucleotides or non-nucleotides or various mixtures and combinations thereof.

[0065] By “nuclease activating compound” is meant a compound, for example a compound having Formula I, that activates the cleavage of an RNA by a nuclease. The nuclease can comprise RNAse L. By “nuclease activating chimera” or “chimera” is meant a nuclease activating compound, for example a compound having Formula I, that is attached to a nucleic acid molecule, for example a nucleic acid molecule that binds preferentially to a target RNA. These chimeric nucleic acid molecules can comprise a nuclease activating compound and an antisense nucleic acid molecule, for example a 2′,5′-oligoadenylate antisense chimera, or an enzymatic nucleic acid molecule, for example a 2′,5′-oligoadenylate enzymatic nucleic acid chimera.

[0066] By “enzymatic portion” or “catalytic domain” is meant that portion/region of the enzymatic nucleic acid essential for cleavage of a nucleic acid substrate (for example, see FIG. 1).

[0067] By “substrate binding arm” or “substrate binding domain” is meant that portion/region of an enzymatic nucleic acid which is complementary to (i.e., able to base-pair with) a portion of its substrate. Generally, such complementarity is 100%, but can be less if desired. For example, as few as 10 bases out of 14 can be base-paired. Such arms are shown generally in FIGS. 1 and 3. That is, these arms contain sequences within an enzymatic nucleic acid which are intended to bring enzymatic nucleic acid and target RNA together through complementary base-pairing interactions. The enzymatic nucleic acid of the invention can have binding arms that are contiguous or non-contiguous and can be of varying lengths. The length of the binding arm(s) are preferably greater than or equal to four nucleotides; specifically 12-100 nucleotides; more specifically 14-24 nucleotides long. If two binding arms are chosen, the design is such that the length of the binding arms are symmetrical (i.e., each of the binding arms is of the same length; e.g., five and five nucleotides, six and six nucleotides or seven and seven nucleotides long) or asymmetrical (i.e., the binding arms are of different length; e.g., six and three nucleotides; three and six nucleotides long; four and five nucleotides long; four and six nucleotides long; four and seven nucleotides long; and the like).

[0068] By “Inozyme” or “NCH” motif is meant an enzymatic nucleic acid molecule comprising a motif as is generally described in FIG. 1 and in Ludwig et al., International PCT publication Nos. WO 98/58058 and WO 98/58057. Inozymes possess endonuclease activity to cleave RNA substrates having a cleavage triplet NCH/, where N is a nucleotide, C is cytidine and H is adenosine, uridine or cytidine, and/represents the cleavage site. H is used interchangeably with X. Inozymes can also possess endonuclease activity to cleave RNA substrates having a cleavage triplet NCN/, where N is a nucleotide, C is cytidine, and/represents the cleavage site. “I” in FIG. 1 represents an Inosine nucleotide, preferably a ribo-Inosine or xylo-Inosine nucleotide.

[0069] By “G-cleaver” motif is meant an enzymatic nucleic acid molecule comprising a motif as is generally described in FIG. 2 and in Eckstein et al., International PCT publication No. WO/9916871. G-cleavers possess endonuclease activity to cleave RNA substrates having a cleavage triplet NYN/, where N is a nucleotide, Y is uridine or cytidine and/represents the cleavage site. G-cleavers can be chemically modified as is generally shown in FIG. 2. G-cleavers can be used, for example, to cleave RNA substrates after an AUG/triplet, where A is adenosine, U is uridine, G is guanosine, and/represents the cleavage site.

[0070] By “zinzyme” motif is meant an enzymatic nucleic acid molecule comprising a motif as is generally described in FIG. 3 and in Beigelman et al, International PCT publication No. WO/9955857. Zinzymes possess endonuclease activity to cleave RNA substrates having a cleavage triplet including but not limited to YG/Y, where Y is uridine or cytidine, and G is guanosine and/represents the cleavage site. Zinzymes can be chemically modified to increase nuclease stability through chemical modifications or substitutions as generally shown in FIG. 3, including substituting 2′-O-methyl guanosine nucleotides for guanosine nucleotides. In addition, differing nucleotide and/or non-nucleotide linkers can be used to substitute the 5′-gaaa-2′ loop shown in the figure. Zinzymes represent a non-limiting example of an enzymatic nucleic acid molecule that does not require a ribonucleotide (2′-OH) group within its own nucleic acid sequence for activity.

[0071] By “amberzyme” motif is meant an enzymatic nucleic acid molecule comprising a motif as is generally described in FIG. 4 and in Beigelman et al., International PCT publication No. WO/9955857. Amberzymes possess endonuclease activity to cleave RNA substrates having a cleavage triplet NG/N, where N is a nucleotide, G is guanosine, and/represents the cleavage site. Amberzymes can be chemically modified to increase nuclease stability through substitutions as are generally shown in FIG. 4. In addition, differing nucleoside and/or non-nucleoside linkers can be used to substitute the 5′-gaaa-3′ loops shown in the figure. Amberzymes represent a non-limiting example of an enzymatic nucleic acid molecule that does not require a ribonucleotide (2′-OH) group within its own nucleic acid sequence for activity.

[0072] By ‘DNAzyme’ is meant an enzymatic nucleic acid molecule that does not require the presence of a 2′-OH group for its activity. In particular embodiments the enzymatic nucleic acid molecule can have an attached linker(s) or other attached or associated groups, moieties, or chains containing one or more nucleotides with 2′-OH groups. DNAzymes can be synthesized chemically or expressed endogenously in vivo, by means of a single stranded DNA vector or equivalent thereof. An example of a DNAzyme is shown in FIG. 5 and is generally reviewed in Usman et al., International PCT Publication No. WO 95/11304; Chartrand et al., 1995, NAR 23, 4092; Breaker et al., 1995, Chem. Bio. 2, 655; Santoro et al., 1997, PNAS 94, 4262; Breaker, 1999, Nature Biotechnology, 17, 422-423; and Santoro et. al., 2000, J. Am. Chem. Soc., 122, 2433-39. Additional DNAzyme motifs can be selected by using techniques similar to those described in these references, and hence, are within the scope of the present invention.

[0073] By “antisense nucleic acid”, it is meant a non-enzymatic nucleic acid molecule that binds to target RNA by means of RNA-RNA or RNA-DNA or RNA-PNA (protein nucleic acid; Egholm et al., 1993 Nature 365, 566) interactions and alters the activity of the target RNA (for a review, see Stein and Cheng, 1993 Science 261, 1004 and Woolf et al., U.S. Pat. No. 5,849,902). Typically, antisense molecules are complementary to a target sequence along a single contiguous sequence of the antisense molecule. However, in certain embodiments, an antisense molecule can bind to substrate such that the substrate molecule forms a loop, and/or an antisense molecule can bind such that the antisense molecule forms a loop. Thus, the antisense molecule can be complementary to two (or even more) non-contiguous substrate sequences or two (or even more) non-contiguous sequence portions of an antisense molecule can be complementary to a target sequence or both. For a review of current antisense strategies, see Schmajuk et al., 1999, J. Biol. Chem., 274, 21783-21789, Delihas et al., 1997, Nature, 15, 751-753, Stein et al., 1997, Antisense N. A. Drug Dev., 7, 151, Crooke, 2000, Methods Enzymol., 313, 3-45; Crooke, 1998, Biotech. Genet. Eng. Rev., 15, 121-157, Crooke, 1997, Ad. Pharmacol., 40, 1-49. In addition, antisense DNA can be used to target RNA by means of DNA-RNA interactions, thereby activating RNase H, which digests the target RNA in the duplex. The antisense oligonucleotides can comprise one or more RNAse H activating region, which is capable of activating RNAse H cleavage of a target RNA. Antisense DNA can be synthesized chemically or expressed via the use of a single stranded DNA expression vector or equivalent thereof.

[0074] By “RNase H activating region” is meant a region (generally greater than or equal to 4-25 nucleotides in length, preferably from 5-11 nucleotides in length) of a nucleic acid molecule capable of binding to a target RNA to form a non-covalent complex that is recognized by cellular RNase H enzyme (see for example Arrow et al., U.S. Pat. No. 5,849,902; Arrow et al., U.S. Pat. No. 5,989,912). The RNase H enzyme binds to the nucleic acid molecule-target RNA complex and cleaves the target RNA sequence. The RNase H activating region comprises, for example, phosphodiester, phosphorothiote (preferably at least four of the nucleotides are phosphorothiote substitutions; more specifically, 4-11 of the nucleotides are phosphorothiote substitutions); phosphorodithioate, 5′-thiophosphate, or methylphosphonate backbone chemistry or a combination thereof. In addition to one or more backbone chemistries described above, the RNase H activating region can also comprise a variety of sugar chemistries. For example, the RNase H activating region can comprise deoxyribose, arabino, fluoroarabino or a combination thereof, nucleotide sugar chemistry. Those skilled in the art will recognize that the foregoing are non-limiting examples and that any combination of phosphate, sugar and base chemistry of a nucleic acid that supports the activity of RNase H enzyme is within the scope of the definition of the RNase H activating region and the instant invention.

[0075] By “2-5A antisense” or “2-5A antisense chimera” is meant an antisense oligonucleotide containing a 5′-phosphorylated 2′-5′-linked adenylate residue. These chimeras bind to target RNA in a sequence-specific manner and activate a cellular 2-5A-dependent ribonuclease which, in turn, cleaves the target RNA (Torrence et al., 1993 Proc. Natl. Acad. Sci. USA 90, 1300; Silverman et al., 2000, Methods Enzymol., 313, 522-533; Player and Torrence, 1998, Pharmacol. Ther., 78, 55-113).

[0076] By “sufficient length” is meant an oligonucleotide of greater than or equal to 3 nucleotides.

[0077] By “stably interact” is meant, interaction of the oligonucleotides with target nucleic acid (e.g., by forming hydrogen bonds with complementary nucleotides in the target under physiological conditions).

[0078] By “equivalent” RNA to HCV is meant to include those naturally occurring RNA molecules associated with HCV infection in various animals, including human, rodent, primate, rabbit and pig. The equivalent RNA sequence also includes in addition to the coding region, regions such as 5′-untranslated region, 3′-untranslated region, introns, intron-exon junction and the like.

[0079] By “homology” is meant the nucleotide sequence of two or more nucleic acid molecules is partially or completely identical.

[0080] In one of the preferred embodiments of the inventions described herein, the enzymatic nucleic acid molecule is formed in a hammerhead or hairpin motif, but can also be formed in the motif of a hepatitis delta virus, group I intron, group II intron or RNase P RNA (in association with an RNA guide sequence), DNAzymes, NCH cleaving motifs (inozymes), or G-cleavers. Examples of such hammerhead motifs (FIG. 1a) are described in Dreyfus, supra, Rossi et al., 1992, AIDS Research and Human Retroviruses 8, 183; Examples of hairpin motifs are described in Hampel et al., EP0360257, Hampel and Tritz, 1989 Biochemistry 28, 4929, Feldstein et al., 1989, Gene 82, 53, Haseloff and Gerlach, 1989, Gene, 82, 43, Hampel et al., 1990 Nucleic Acids Res. 18, 299; Chowrira & McSwiggen, U.S. Pat. No. 5,631,359. The hepatitis delta virus motif is generally described in Perrotta and Been, 1992 Biochemistry 31, 16. The RNase P motif is generally described in Guerrier-Takada et al., 1983 Cell 35, 849; Forster and Altman, 1990, Science 249, 783; Li and Altman, 1996, Nucleic Acids Res. 24, 835. Examples of group II introns are generally described in Griffin et al., 1995, Chem. Biol. 2, 761; Michels and Pyle, 1995, Biochemistry 34, 2965; Pyle et al, International PCT Publication No. WO 96/22689. The Group I intron is generally described in Cech et al., U.S. Pat. No. 4,987,071. DNAzymes (FIG. 4) are generally described in Usman et al., International PCT Publication No. WO 95/11304; Chartrand et al., 1995, NAR 23, 4092; Breaker et al., 1995, Chem. Bio. 2, 655; Santoro et al., 1997, PNAS 94, 4262; Breaker, 1999, Nature Biotechnology, 17, 422-423; Santoro et. al., 2000, J. Am. Chem. Soc., 122, 2433-39). NCH cleaving motifs (FIG. 1b) are generally described in Ludwig & Sproat, International PCT Publication No. WO 98/58058; and G-cleavers (FIG. 1c) are generally described in Kore et al., 1998, Nucleic Acids Research 26, 4116-4120 and Eckstein et al., International PCT Publication No. WO 99/16871. Additional motifs contemplated by the instant invention include the Allozyme or allosteric enzymatic nucleic acid molecule (Breaker et al., WO 98/43993, Shih et. al., U.S. Pat. No. 5,589,332, George et al., U.S. Pat. No. 5,741,679), Amberzyme (FIG. 2, Class I motif in Beigelman et al., International PCT publication No. WO 99/55857) and Zinzyme (FIG. 3, Class II motif in Beigelman et al, International PCT publication No. WO 99/55857), all these references are incorporated by reference herein in their totalities, including drawings and can also be used in the present invention. These specific motifs are not limiting in the invention. Those skilled in the art will recognize that all that is important is that the enzymatic molecule have a specific substrate binding site which is complementary to one or more of the target gene RNA regions, and that it have nucleotide sequences within or surrounding that substrate binding site which impart an RNA cleaving activity to the molecule (Cech et al., U.S. Pat. No. 4,987,071).

[0081] By “complementarity” is meant that a nucleic acid can form hydrogen bond(s) with another RNA sequence by either traditional Watson-Crick or other non-traditional types. In reference to the nucleic molecules of the present invention, the binding free energy for a nucleic acid molecule with its target or complementary sequence is sufficient to allow the relevant function of the nucleic acid to proceed, e.g., enzymatic nucleic acid cleavage. Determination of binding free energies for nucleic acid molecules is well known in the art (see, e.g., Turner et al., 1987, CSH Symp. Quant. Biol. LII pp.123-133; Frier et al., 1986, Proc. Nat. Acad. Sci. USA 83:9373-9377; Turner et al., 1987, J. Am. Chem. Soc. 109:3783-3785). A percent complementarity indicates the percentage of contiguous residues in a nucleic acid molecule which can form hydrogen bonds (e.g., Watson-Crick base pairing) with a second nucleic acid sequence (e.g., 5, 6, 7, 8, 9, 10 out of 10 being 50%, 60%, 70%, 80%, 90%, and 100% complementary). “Perfectly complementary” means that all the contiguous residues of a nucleic acid sequence will hydrogen bond with the same number of contiguous residues in a second nucleic acid sequence.

[0082] In a preferred embodiment, the invention provides a method for producing a class of enzymatic cleaving agents which exhibit a high degree of specificity for the RNA of a desired target. The enzymatic nucleic acid molecule, nuclease activating compound or chimera is preferably targeted to a highly conserved sequence region of a target mRNAs encoding HCV proteins such that specific treatment of a disease or condition can be provided with either one or several enzymatic nucleic acids. Such nucleic acid molecules can be delivered exogenously to specific cells as required. Alternatively, the enzymatic nucleic acid molecules can be expressed from DNA/RNA vectors that are delivered to specific cells. DNAzymes can be synthesized chemically or expressed endogenously in vivo, by means of a single stranded DNA vector or equivalent thereof.

[0083] By “highly conserved sequence region” is meant a nucleotide sequence of one or more regions in a target gene does not vary significantly from one generation to the other or from one biological system to the other.

[0084] Such enzymatic nucleic acid molecules, nuclease activating compound or chimera molecules are useful for the prevention of the diseases and conditions discussed above, and any other diseases or conditions that are related to the levels of HCV activity in a cell or tissue.

[0085] By “related” is meant that the inhibition of HCV RNAs and thus reduction in the level respective viral activity will relieve to some extent the symptoms of the disease or condition.

[0086] The nucleic acid-based inhibitors, nuclease activating compounds and chimeras of the invention are added directly, or can be complexed with cationic lipids, packaged within liposomes, or otherwise delivered to target cells or tissues. The nucleic acid or nucleic acid complexes, and nuclease activating compounds or chimeras can be locally administered to relevant tissues ex vivo, or in vivo through injection or infusion pump, with or without their incorporation in biopolymers. In preferred embodiments, the enzymatic nucleic acid inhibitors, and nuclease activating compounds or chimeras comprise sequences, which are complementary to the substrate sequences in Tables III, IV, V and VIII. Examples of such enzymatic nucleic acid molecules also are shown in Tables III, IV, V, VI and VIII. Examples of such enzymatic nucleic acid molecules consist essentially of sequences defined in these tables. In additional embodiments, the enzymatic nucleic acid inhibitors of the invention that comprise sequences which are complementary to the substrate sequences in Tables III, IV, V and VIII are covalently attached to nuclease activating compound or chimeras of the invention, for example a compound having Formula I.

[0087] In yet another embodiment, the invention features antisense nucleic acid molecules and 2-5A chimera including sequences complementary to the substrate sequences shown in Tables III, IV, V and VIII. Such nucleic acid molecules can include sequences as shown for the binding arms of the enzymatic nucleic acid molecules in Tables III, IV, V, VI and VIII. Similarly, triplex molecules can be provided targeted to the corresponding DNA target regions, and containing the DNA equivalent of a target sequence or a sequence complementary to the specified target (substrate) sequence. Typically, antisense molecules are complementary to a target sequence along a single contiguous sequence of the antisense molecule. However, in certain embodiments, an antisense molecule can bind to substrate such that the substrate molecule forms a loop, and/or an antisense molecule can bind such that the antisense molecule forms a loop. Thus, the antisense molecule can be complementary to two (or even more) non-contiguous substrate sequences or two (or even more) non-contiguous sequence portions of an antisense molecule can be complementary to a target sequence or both.

[0088] By “consists essentially of” is meant that the active compound or nucleic acid molecule of the invention, for example an enzymatic nucleic acid molecule, contains an enzymatic center or core equivalent to those in the examples, and binding arms able to bind RNA such that cleavage at the target site occurs. Other sequences can be present which do not interfere with such cleavage. Thus, a core region can, for example, include such a loop, stem-loop, nucleotide linker, and/or non-nucleotide linker and can be represented generally as sequence “X”. For example, a core sequence for a hammerhead enzymatic nucleic acid can comprise a conserved sequence, such as 5′-CUGAUGAG-3′ and 5′-CGAA-3′ connected by “X”, where X is 5′-GCCGUUAGGC-3′ (SEQ ID NO. 9704), or any other Stem II region known in the art, or a nucleotide and/or non-nucleotide linker. Similarly, for other compounds and nucleic acid molecules of the instant invention, such as Inozyme, G-cleaver, amberzyme, zinzyme, DNAzyme, antisense, and 2-5A antisense, other sequences or non-nucleotide linkers can be present that do not interfere with the function of the nucleic acid molecule.

[0089] Sequence X can be a linker of ≧2 nucleotides in length, preferably 3, 4, 5, 6, 7, 8, 9, 10, 15, 20, 26, 30, where the nucleotides can preferably be internally base-paired to form a stem of preferably ≧2 base pairs. Alternatively or in addition, sequence X can be a non-nucleotide linker. In yet another embodiment, the nucleotide linker X can be a nucleic acid aptamer, such as an ATP aptamer, HIV Rev aptamer (RRE), HIV Tat aptamer (TAR) and others (for a review see Gold et al., 1995, Annu. Rev. Biochem., 64, 763; and Szostak & Ellington, 1993, in The RNA World, ed. Gesteland and Atkins, pp. 511, CSH Laboratory Press). A “nucleic acid aptamer” as used herein is meant to indicate a nucleic acid sequence capable of interacting with a ligand. The ligand can be any natural or a synthetic molecule, including but not limited to a resin, metabolites, nucleosides, nucleotides, drugs, toxins, transition state analogs, peptides, lipids, proteins, amino acids, nucleic acid molecules, hormones, carbohydrates, receptors, cells, viruses, bacteria and others.

[0090] In yet another embodiment, the non-nucleotide linker X is as defined herein. The term “non-nucleotide” as used herein include either abasic nucleotide, polyether, polyamine, polyamide, peptide, carbohydrate, lipid, or polyhydrocarbon compounds. Specific examples include those described by Seela and Kaiser, Nucleic Acids Res. 1990, 18:6353 and Nucleic Acids Res. 1987, 15:3113; Cload and Schepartz, J. Am. Chem. Soc. 1991, 113:6324; Richardson and Schepartz, J. Am. Chem. Soc. 1991, 113:5109; Ma et al., Nucleic Acids Res. 1993, 21:2585 and Biochemistry 1993, 32:1751; Durand et al., Nucleic Acids Res. 1990, 18:6353; McCurdy et al., Nucleosides & Nucleotides 1991, 10:287; Jschke et al., Tetrahedron Lett. 1993, 34:301; Ono et al., Biochemistry 1991, 30:9914; Arnold et al., International Publication No. WO 89/02439; Usman et al., International Publication No. WO 95/06731; Dudycz et al., International Publication No. WO 95/11910 and Ferentz and Verdine, J. Am. Chem. Soc. 1991, 113:4000, all hereby incorporated by reference herein. A “non-nucleotide” further means any group or compound which can be incorporated into a nucleic acid chain in the place of one or more nucleotide units, including either sugar and/or phosphate substitutions, and allows the remaining bases to exhibit their enzymatic activity. The group or compound can be abasic in that it does not contain a commonly recognized nucleotide base, such as adenosine, guanine, cytosine, uracil or thymine. Thus, in a preferred embodiment, the invention features an enzymatic nucleic acid molecule having one or more non-nucleotide moieties, and having enzymatic activity to cleave an RNA or DNA molecule.

[0091] Thus, in a first aspect, the invention features nucleic acid molecules and nuclease activating compounds or chimeras that inhibit gene expression and/or viral replication. These chemically or enzymatically synthesized nucleic acid molecules can contain substrate binding domains that bind to accessible regions of their target mRNAs. The nucleic acid molecules also contain domains that catalyze the cleavage of RNA. The enzymatic nucleic acid molecules are preferably molecules of the hammerhead, Inozyme, DNAzyme, Zinzyme, Amberzyme, and/or G-cleaver motifs. Upon binding, the enzymatic nucleic acid molecules cleave the target mRNAs, preventing translation and protein accumulation. In the absence of the expression of the target gene, HCV gene expression and/or replication is inhibited.

[0092] In one embodiment, the nucleic acid molecules and nuclease activating compounds or chimeras are added directly, or can be complexed with cationic lipids, packaged within liposomes, or otherwise delivered to target cells using delivery methods described herein and known in the art. The nucleic acid or nucleic acid complexes can be locally administered to relevant tissues ex vivo, or in vivo through injection, infusion pump or stent, with or without their incorporation in biopolymers. In another embodiment, the nucleic acid molecule, nuclease activating compound or chimera is administered to the site of HCV activity (e.g., hepatocytes) in an appropriate liposomal vehicle.

[0093] In another embodiment of the invention, nucleic acid molecules that cleave target molecules and inhibit HCV activity are expressed from transcription units inserted into DNA or RNA vectors. The recombinant vectors are preferably DNA plasmids or viral vectors. Nucleic acid molecule expressing viral vectors can be constructed based on, but not limited to, adeno-associated virus, retrovirus, adenovirus, or alphavirus. Preferably, the recombinant vectors capable of expressing the nucleic acid molecules are delivered as described above, and persist in target cells. Alternatively, viral vectors can be used that provide for transient expression of nucleic acid molecules. Such vectors can be repeatedly administered as necessary. Once expressed, the nucleic acid molecules cleave the target mRNA. Delivery of enzymatic nucleic acid molecule expressing vectors can be systemic, such as by intravenous or intramuscular administration, by administration to target cells ex-planted from the patient followed by reintroduction into the patient, or by any other means that would allow for introduction into the desired target cell (for a review see Couture and Stinchcomb, 1996, TIG., 12, 510). In another aspect of the invention, nucleic acid molecules that cleave target molecules and inhibit viral replication are expressed from transcription units inserted into DNA, RNA, or viral vectors. Preferably, the recombinant vectors capable of expressing the nucleic acid molecules are locally delivered as described above, and transiently persist in smooth muscle cells. However, other mammalian cell vectors that direct the expression of RNA can be used for this purpose.

[0094] By “patient” is meant an organism which is a donor or recipient of explanted cells or the cells themselves. “Patient” also refers to an organism to which enzymatic nucleic acid molecules can be administered. Preferably, a patient is a mammal or mammalian cells. More preferably, a patient is a human or human cells.

[0095] As used in herein “cell” is used in its usual biological sense, and does not refer to an entire multicellular organism, e.g., specifically does not refer to an entire human. The cell can be present in a multicellular organism, e.g., birds, plants and mammals such as cows, sheep, apes, monkeys, swine, dogs, and cats.

[0096] By RNA is meant a molecule comprising at least one ribonucleotide residue. By “ribonucleotide” is meant a nucleotide with a hydroxyl group at the 2′ position (eg; 2′-OH) of a β-D-ribo-furanose moiety.

[0097] By “vectors” is meant any nucleic acid- and/or viral-based technique used to deliver a desired nucleic acid.

[0098] These nucleic acid molecules, nuclease activating compounds and chimeras individually, or in combination or in conjunction with other drugs, can be used to treat diseases or conditions discussed above. For example, to treat a disease or condition associated with HCV levels, the patient can be treated, or other appropriate cells can be treated, as is evident to those skilled in the art.

[0099] In a further embodiment, the described molecules can be used in combination with other known treatments to treat conditions or diseases discussed above. For example, the described molecules could be used in combination with one or more known therapeutic agents to treat liver failure, hepatocellular carcinoma, cirrhosis, and/or other disease states associated with HCV infection. Additional known therapeutic agents are those comprising antivirals, interferons, and/or antisense compounds.

[0100] By “comprising” is meant including, but not limited to, whatever follows the word “comprising”. Thus, use of the term “comprising” indicates that the listed elements are required or mandatory, but that other elements are optional and can or can not be present. By “consisting of” is meant including, and limited to, whatever follows the phrase “consisting of”. Thus, the phrase “consisting of” indicates that the listed elements are required or mandatory, and that no other elements can be present. By “consisting essentially of” is meant including any elements listed after the phrase, and limited to other elements that do not interfere with or contribute to the activity or action specified in the disclosure for the listed elements. Thus, the phrase “consisting essentially of” indicates that the listed elements are required or mandatory, but that other elements are optional and can or can not be present depending upon whether or not they affect the activity or action of the listed elements.

[0101] Other features and advantages of the invention will be apparent from the following description of the preferred embodiments thereof, and from the claims.

### DESCRIPTION OF THE PREFERRED EMBODIMENTS

[0102] The drawings will first briefly be described.

[0103] Drawings:

[0104] FIG. 1 is a diagrammatic representation of a Hammerhead and an Inozyme motif. The examples shown are chemically stabilized with 2′-O-methyl substitutions (lower case), a 2′-deoxy-2′-C-allyl Uridine substitution at position U-4, and a 3′-terminal inverted deoxyabasic moiety. Conserved ribonucleotides are shown as rN, for example G-5, A-6, G-8, G-2, and I-15.1. Phosphorothioate internucleotide substitutions can be introduced, for example, at the four terminal 5′ end nucleotides for increased stability to nuclease degradation. Stem II can be >2 base-pair long, preferably, 2, 3, 4, 5, 6, 7, 8, and 10 base-pairs long. Each N and N′ is independently any base or non-nucleotide as used herein; X is adenosine, cytidine or uridine; Stems I-III are meant to indicate three stem-loop structures; stems I-III can be of any length and can be symmetrical or asymmetrical; arrow indicates the site of cleavage in the target RNA; Rz refers to enzymatic nucleic acid; Loop II can be present or absent. If Loop II is present it is greater than or equal to three nucleotides, preferably four nucleotides. The Loop II sequence is preferably 5′-GAAA-3′ or 5′-GUUA-3′. Inozyme position 15.1 comprises an Inosine nucleotide, which can be ribo-Inosine or xylo-Inosine.

[0105] FIG. 2 is a diagrammatic representation of a G-cleaver motif. The example shown is chemically stabilized with 2′-O-methyl substitutions, phosphorothioate internucleotide linkage substitutions, and a 3′-termianl inverted deoxyabasic moiety. In the figure, lower case a, g, c, and u represent 2′-O-methyl adenosine, guanosine, cytidine, and uridine nucleotides respectively; upper case A, G, C and U represent adenosine, guanosine, cytidine and uridine nucleotides respectively; “s” refers to phosphorothioate internucleotide linkages, and iB represents an 3′-terminal inverted deoxyabasic moiety.

[0106] FIG. 3 is a diagrammatic representation of a zinzyme motif. The example shown is chemically stabilized with 2′-O-methyl substitutions, phosphorothioate internucleotide linkage substitutions, and a 3′-termianl inverted deoxyabasic moiety. C in the figure represents a 2′-deozy-2′-amino cytidine nucleotide; lower case a, g, c, and u represent 2′-O-methyl adenosine, guanosine, cytidine, and uridine nucleotides respectively; uppercase A, G, C and U represent adenosine, guanosine, cytidine and uridine nucleotides respectively; “s” refers to phosphorothioate internucleotide linkages, and iB represents an 3′-terminal inverted deoxyabasic moiety. All of the ribo-guanosine nucleotides in the zinzyme motif can be replaced with 2′-O-methyl guanosine nucleotides. The 5′-gaaa-3′ loop can be replaced with other nucleotide containing loop structures and/or non-nucleotide linkers, including PEG linkers. The guanosine nucleotide represented as G′ in the figure can be replaced with either 2′-O-methyl guanosine, 5′-cytidine-adenosine-3′, or 5′-cytidine-adenosine-adenosine-3′ nucleotides and/or their corresponding 2′-O-methyl nucleotide derivatives.

[0107] FIG. 4 is a diagrammatic representation of an amberzyme motif. The example shown is chemically stabilized with 2′-O-methyl substitutions and a 3′-termianl inverted deoxyabasic moiety. C in the figure represents a 2′-deoxy-2′-amino cytidine nucleotide; lower case a, g, c, and u represent 2′-O-methyl adenosine, guanosine, cytidine, and uridine nucleotides respectively; uppercase A, G, C and U represent adenosine, guanosine, cytidine and uridine nucleotides respectively; and iB represents an 3′-terminal inverted deoxyabasic moiety. The amberzyme motif can be further stabilized through introducing phosphorothioate internucleotide linkages, for example at the four terminal 5′-internucleotide linkages.

[0108] FIG. 5 is a diagrammatic representation of a DNAzyme motif described generally, for example in Santoro et al., 1997, PNAS, 94, 4262.

[0109] FIG. 6 is a schematic representation of the Dual Reporter System utilized to demonstrate enzymatic nucleic acid mediated reduction of luciferase activity in cell culture.

[0110] FIG. 7 shows a schematic view of the secondary structure of the HCV 5′UTR (Brown et al., 1992, Nucleic Acids Res., 20, 5041-45; Honda et al., 1999, J. Virol., 73, 1165-74). Major structural domains are indicated in bold. Enzymatic nucleic acid cleavage sites are indicated by arrows. Solid arrows denote sites amenable to amino-modified enzymatic nucleic acid inhibition. Lead cleavage sites (195 and 330) are indicated with oversized solid arrows.

[0111] FIG. 8 shows a non-limiting example of a nuclease resistant enzymatic nucleic acid molecule. Binding arms are indicated as stem I and stem III. Nucleotide modifications are indicated as follows: 2′-O-methyl nucleotides, lowercase; ribonucleotides, uppercase G, A; 2′-amino-uridine, u; inverted 3′-3′ deoxyabasic, B. The positions of phosphorothioate linkages at the 5′-end of each enzymatic nucleic acid are indicated by subscript “s”. H indicates A, C or U ribonucleotide, N′ indicates A, C G or U ribonucleotide in substrate, n indicates base complementary to the N′. The U4 and U7 positions in the catalytic core are indicated.

[0112] FIG. 9 is a set of bar graphs showing enzymatic nucleic acid mediated inhibition of HCV-luciferase expression in OST7 cells. OST7 cells were transfected with complexes containing reporter plasmids (2 μg/mL), enzymatic nucleic acids (100 nM) and lipid. The ratio of HCV-firefly luciferase luminescence/Renilla luciferase luminescence was determined for each enzymatic nucleic acid tested and was compared to treatment with the ICR, an irrelevant control enzymatic nucleic acid lacking specificity to the HCV 5′UTR (adjusted to 1). Results are reported as the mean of triplicate samples ±SD. In FIG. 9A, OST7 cells were treated with enzymatic nucleic acids (100 nM) targeting conserved sites (indicated by cleavage site) within the HCV 5′UTR. In FIG. 9B, OST7 cells were treated with a subset of enzymatic nucleic acids to lead HCV sites (indicated by cleavage site) and corresponding attenuated core (AC) controls. Percent decrease in firefly/Renilla luciferase ratio after treatment with active enzymatic nucleic acids as compared to treatment with corresponding ACs is shown when the decrease is ≧50% and statistically significant. Similar results were obtained with 50 nM enzymatic nucleic acid.

[0113] FIG. 10 is a series of line graphs showing the dose-dependent inhibition of HCV/luciferase expression following enzymatic nucleic acid treatment. Active enzymatic nucleic acid was mixed with corresponding AC to maintain a 100 nM total oligonucleotide concentration and the same lipid charge ratio. The concentration of active enzymatic nucleic acid for each point is shown. FIGS. 10A-E shows enzymatic nucleic acids targeting sites 79, 81, 142, 195, or 330, respectively. Results are reported as the mean of triplicate samples ±SD.

[0114] FIG. 11 is a set of bar graphs showing reduction of HCV/luciferase RNA and inhibition of HCV-luciferase expression in OST7 cells. OST7 cells were transfected with complexes containing reporter plasmids (2 μg/ml), enzymatic nucleic acids, BACs or SACs (50 nM) and lipid. Results are reported as the mean of triplicate samples ±SD. In FIG. 1A the ratio of HCV-firefly luciferase RNA/Renilla luciferase RNA is shown for each enzymatic nucleic acid or control tested. As compared to paired BAC controls (adjusted to 1), luciferase RNA levels were reduced by 40% and 25% for the site 195 or 330 enzymatic nucleic acids, respectively. In FIG. 11B the ratio of HCV-firefly luciferase luminescence/Renilla luciferase luminescence is shown after treatment with site 195 or 330 enzymatic nucleic acids or paired controls. As compared to paired BAC controls (adjusted to 1), inhibition of protein expression was 70% and 40% for the site 195 or 330 enzymatic nucleic acids, respectively P<0.01.

[0115] FIG. 12 is a set a bar graphs showing interferon (IFN) alpha 2a and 2b dose response in combination with site 195 anti-HCV enzymatic nucleic acid treatment. FIG. 12A shows data for IFN alfa 2a treatment. FIG. 12B shows data for IFN alfa 2b treatment. Viral yield is reported from HeLa cells pretreated with IFN in units/ml (U/ml) as indicated for 4 h prior to infection and then treated with either 200 nM control (SAC) or site 195 anti-HCV enzymatic nucleic acid (195 RZ) for 24 h after infection. Cells were infected with a MOI=0.1 for 30 min and collected at 24 h post infection. Error bars represent the S.D. of the mean of triplicate determinations.

[0116] FIG. 13 is a line graph showing site 195 anti-HCV enzymatic nucleic acid dose response in combination with interferon (IFN) alpha 2a and 2b pretreatment. Viral yield is reported from HeLa cells pretreated for 4 h with or without IFN and treated with doses of site 195 anti-HCV enzymatic nucleic acid (195 RZ) as indicated for 24 h after infection. Anti-HCV enzymatic nucleic acid was mixed with control oligonucleotide (SAC) to maintain a constant 200 nM total dose of nucleic acid for delivery. Cells were infected with a MOI=0.1 for 30 min and collected at 24 h post infection. Error bars represent the S.D. of the mean of triplicate determinations.

[0117] FIG. 14 is a set of bar graphs showing data from consensus interferon (CIFN)/enzymatic nucleic acid combination treatment. FIG. 14A shows CIFN dose response with site 195 anti-HCV enzymatic nucleic acid treatment. Viral yield is reported from cells pretreated with CIFN in units/ml (U/ml) as indicated and treated with either 200 nM control (SAC) or site 195 anti-HCV enzymatic nucleic acid (195 RZ). FIG. 14B shows site 195 anti-HCV enzymatic nucleic acid dose response with CIFN pretreatment. Viral yield is reported from cells pretreated with or without CIFN and treated with concentrations of site 195 anti-HCV enzymatic nucleic acid (195 RZ) as indicated. Anti-HCV enzymatic nucleic acid was mixed with control oligonucleotide (SAC) to maintain a constant 200 nM total dose of nucleic acid for delivery. Cells were infected with a MOI=0.1 for 30 min. and collected at 24 h post infection. Error bars represent the S.D. of the mean of triplicate determinations.

[0118] FIG. 15 is a bar graph showing enzymatic nucleic acid activity and enhanced antiviral effect of an anti-HCV enzymatic nucleic acid targeting site 195 used in combination with consensus interferon (CIFN). Viral yield is reported from cells treated as indicated. BAC, cells were treated with 200 nM BAC (binding attenuated control) for 24 h after infection; CIFN+BAC, cells were treated with 12.5 U/ml CIFN for 4 h prior to infection and with 200 nM BAC for 24 h after infection; 195 RZ, cells were treated with 200 nM site 195 anti-HCV enzymatic nucleic acid for 24 h after infection; CIFN+195 RZ, cells were treated with 12.5 U/ml CIFN for 4 h prior to infection and with 200 nM site 195 anti-HCV enzymatic nucleic acid for 24 h after infection. Cells were infected with a MOI=0.1 for 30 min. Error bars represent the S.D. of the mean of triplicate determinations.

[0119] FIG. 16 is a bar graph showing inhibition of a HCV-PV chimera replication by treatment with zinzyme enzymatic nucleic acid molecules targeting different sites within the HCV 5′-UTR compared to a scrambled attenuated core control (SAC) zinzyme.

[0120] FIG. 17 is a bar graph showing inhibition of a HCV-PV chimera replication by antisense nucleic acid molecules targeting conserved regions of the HCV 5′-UTR compared to scrambled antisense controls.

[0121] FIG. 18 shows the structure of compounds (2-5A) utilized in the study. “X” denotes the position of oxygen (0) in analog I or sulfur (S) in thiophosphate (P═S) analog II. The 2-5A compounds were synthesized, deprotected and purified as described herein utilizing CPG support with 3′-inverted abasic nucleotide. For chain extension 5′-O-(4,4′-dimetoxytrityl)-3′-O-(tert-butyldimethylsilyl)-N6-benzoyladenosine-2-cyanoethyl-N,N-diisopropyl-phosphoramidite (Chem. Genes Corp., Waltham, Mass.) was employed. Introduction of a 5′-terminal phosphate (analog I) or thiophosphate (analog II) group was performed with “Chemical Phosphorylation Reagent” (Glen Research, Sterling, Va.). Structures of the final compounds were confirmed by MALDI-TOF analysis.

[0122] FIG. 19 is a bar graph showing ribozyme activity and enhanced antiviral effect. (A) Interferon/ribozyme combination treatment. (B) 2-5A/ribozyme combination treatment. HeLa cells seeded in 96-well plates (10,000 cells per well) were pretreated as indicated for 4 hours. For pretreatment, SAC (RPI 17894), RZ (RPI 13919), and 2-5A analog I (RPI 21096) (200 nM) were complexed with lipid cytofectin. Cells were then infected with HCV-PV at a multiplicity of infection of 0.1. Virus inoculum was replaced after 30 minutes with media containing 5% serum and 100 nM RZ or SAC as indicated, complexed with cytofectin RPI.9778. After 20 hours, cells were lysed by 3 freeze/thaw cycles and virus was quantified by plaque assay. Plaque forming units (PFU)/ml are shown as the mean of triplicate samples +SEM. The absolute amount of viral yield in treated cells varied from day to day, presumably due to day to day variations in cell plating and transfection complexation. None, normal media; IFN, 10 U/ml consensus interferon; SAC, scrambled arm attenuated core control (RPI 17894); RZ, anti-HCV ribozyme (RPI 13919); 2-5A, (RPI 21096).

[0123] FIG. 20 is a graph showing the inhibition of viral replication with anti-HCV ribozyme (RPI 13919) or 2-5A (RPI 21096) treatment. HeLa cells were treated as described in FIG. 19 except that there was no pretreatment and 200 nM oligonucleotide was used for treatment. 2-5A P═S contains a 5′-terminal thiophosphate (RPI21095) (see FIG. 18).

[0124] FIG. 21 is a bar graph showing anti-HCV ribozyme in combination with 2-5A treatment. HeLa cells were treated as described in FIG. 20 except concentrations were co-varied as shown to maintain a constant 200 nM total oligonucleotide dose for transfection. Cells treated with 50 nM anti-HCV ribozyme (RPI 13919) (middle bars) were also treated with 150 nM SAC (RPI 17894) or 2-5A (RPI 21096); likewise, cells treated with 100 nM anti-HCV ribozyme (bars at right) were also treated with 100 nM SAC or 2-5A.

### MECHANISM OF ACTION OF NUCLEIC ACID MOLECULES OF THE INVENTION

[0125] Antisense:

[0126] Antisense molecules can be modified or unmodified RNA, DNA, or mixed polymer oligonucleotides and primarily function by specifically binding to matching sequences resulting in inhibition of peptide synthesis (Wu-Pong, November 1994, BioPharm, 20-33). The antisense oligonucleotide binds to target RNA by Watson Crick base-pairing and blocks gene expression by preventing ribosomal translation of the bound sequences either by steric blocking or by activating RNase H enzyme. Antisense molecules can also alter protein synthesis by interfering with RNA processing or transport from the nucleus into the cytoplasm (Mukhopadhyay & Roth, 1996, Crit. Rev. in Oncogenesis 7, 151-190).

[0127] In addition, binding of single stranded DNA to RNA can result in nuclease degradation of the heteroduplex (Wu-Pong, supra; Crooke, supra). To date, the only backbone modified DNA chemistry which will act as substrates for RNase H are phosphorothioates, phosphorodithioates, and borontrifluoridates. Recently it has been reported that 2′-arabino and 2′-fluoro arabino-containing oligos can also activate RNase H activity.

[0128] A number of antisense molecules have been described that utilize novel configurations of chemically modified nucleotides, secondary structure, and/or RNase H substrate domains (Woolf et al., International PCT Publication No. WO 98/13526; Thompson et al., International PCT Publication No. WO 99/54459; Hartmann et al., U.S. Ser. No. 60/101,174 which was filed on Sep. 21, 1998) all of these are incorporated by reference herein in their entirety.

[0129] In addition, antisense deoxyoligoribonucleotides can be used to target RNA by means of DNA-RNA interactions, thereby activating RNase H, which digests the target RNA in the duplex. Antisense DNA can be expressed via the use of a single stranded DNA intracellular expression vector or equivalents and variations thereof.

[0130] 2-5A Antisense Chimera:

[0131] The 2-5A system is an interferon mediated mechanism for RNA degradation found in higher vertebrates (Mitra et al., 1996, Proc Nat Acad Sci USA 93, 6780-6785). Two types of enzymes, 2-5A synthetase and RNase L, are required for RNA cleavage. The 2-5A synthetases require double stranded RNA to form 2′-5′ oligoadenylates (2-5A). 2-5A then acts as an allosteric effector for utilizing RNase L which has the ability to cleave single stranded RNA. The ability to form 2-5A structures with double stranded RNA makes this system particularly useful for inhibition of viral replication.

[0132] (2′-5′) oligoadenylate structures can be covalently linked to antisense molecules to form chimeric oligonucleotides capable of RNA cleavage (Torrence, supra). Alternatively, (2′-5′) oligoadenylate structures can be covalently linked to enzymatic nucleic acid molecules to form chimeric oligonucleotides capable of RNA cleavage. These molecules putatively bind and activate a 2-5A dependent RNase, the oligonucleotide/enzyme complex then binds to a target RNA molecule which can then be cleaved by the RNase enzyme and the enzymatic nucleic acid.

[0133] Enzymatic Nucleic Acid Molecules

[0134] There are several known classes of enzymatic nucleic acid molecules capable of cleaving target RNA. In addition, several in vitro selection (evolution) strategies (Orgel, 1979, Proc. R. Soc. London, B 205, 435) have been used to evolve new nucleic acid catalysts capable of catalyzing cleavage and ligation of phosphodiester linkages (Joyce, 1989, Gene, 82, 83-87; Beaudry et al., 1992, Science 257, 635-641; Joyce, 1992, Scientific American 267, 90-97; Breaker et al., 1994, TIBTECH 12, 268; Bartel et al., 1993, Science 261:1411-1418; Szostak, 1993, TIBS 17, 89-93; Kumar et al., 1995, FASEB J., 9, 1183; Breaker, 1996, Curr. Op. Biotech., 7, 442; Santoro et al., 1997, Proc. Natl. Acad. Sci., 94, 4262; Tang et al., 1997, RNA 3, 914; Nakamaye & Eckstein, 1994, supra; Long & Uhlenbeck, 1994, supra; Ishizaka et al., 1995, supra; Vaish et al., 1997, Biochemistry 36, 6495; all of these are incorporated by reference herein). Each can catalyze a series of reactions including the hydrolysis of phosphodiester bonds in trans (and thus can cleave other RNA molecules) under physiological conditions. Table I summarizes some of the characteristics of some of these enzymatic nucleic acids. In general, enzymatic nucleic acids act by first binding to a target RNA. Such binding occurs through the target binding portion of an enzymatic nucleic acid which is held in close proximity to an enzymatic portion of the molecule that acts to cleave the target RNA. Thus, the enzymatic nucleic acid first recognizes and then binds a target RNA through complementary base-pairing, and once bound to the correct site, acts enzymatically to cut the target RNA. Strategic cleavage of such a target RNA destroys its ability to direct synthesis of an encoded protein. After an enzymatic nucleic acid has bound and cleaved its RNA target, it is released from that RNA to search for another target and can repeatedly bind and cleave new targets.

[0135] The enzymatic nature of an enzymatic nucleic acid molecule is advantageous over other technologies, since the concentration of enzymatic nucleic acid molecule necessary to affect a therapeutic treatment is lower. This advantage reflects the ability of the enzymatic nucleic acid molecule to act enzymatically. Thus, a single enzymatic nucleic acid molecule is able to cleave many molecules of target RNA. In addition, the enzymatic nucleic acid molecule is a highly specific inhibitor, with the specificity of inhibition depending not only on the base-pairing mechanism of binding to the target RNA, but also on the mechanism of target RNA cleavage. Single mismatches, or base-substitutions, near the site of cleavage can be chosen to completely eliminate catalytic activity of an enzymatic nucleic acid molecule.

[0136] Nucleic acid molecules having an endonuclease enzymatic activity are able to repeatedly cleave other separate RNA molecules in a nucleotide base sequence-specific manner. Such enzymatic nucleic acid molecules can be targeted to virtually any RNA transcript, and efficient cleavage achieved in vitro (Zaug et al., 324, Nature 429 1986; Uhlenbeck, 1987 Nature 328, 596; Kim et al., 84 Proc. Natl. Acad. Sci. USA 8788, 1987; Dreyfus, 1988, Einstein Quart. J. Bio. Med., 6, 92; Haseloff and Gerlach, 334 Nature 585, 1988; Cech, 260 JAMA 3030, 1988; and Jefferies et al., 17 Nucleic Acids Research 1371, 1989; Chartrand et al., 1995, Nucleic Acids Research 23, 4092; Santoro et al., 1997, PNAS 94, 4262).

[0137] Because of their sequence-specificity, trans-cleaving enzymatic nucleic acid molecules show promise as therapeutic agents for human disease (Usman & McSwiggen, 1995 Ann. Rep. Med. Chem. 30, 285-294; Christoffersen and Marr, 1995 J. Med. Chem. 38, 2023-2037). Enzymatic nucleic acid molecules can be designed to cleave specific RNA targets within the background of cellular RNA. Such a cleavage event renders the RNA non-functional and abrogates protein expression from that RNA. In this manner, synthesis of a protein associated with a disease state can be selectively inhibited.

[0138] Enzymatic nucleic acid molecules that cleave the specified sites in HCV RNAs represent a novel therapeutic approach to infection by the hepatitis C virus. As shown herein, enzymatic nucleic acids are able to inhibit the activity of HCV and the catalytic activity of the enzymatic nucleic acids is required for their inhibitory effect. Those of ordinary skill in the art will find that it is clear from the examples described that other enzymatic nucleic acid molecules that cleave HCV RNAs can be readily designed and are within the invention.

[0139] Target sites

[0140] Targets for useful nucleic acid molecules and nuclease activating compounds or chimeras can be determined as disclosed in Draper et al., WO 93/23569; Sullivan et al., WO 93/23057; Thompson et al., WO 94/02595; Draper et al., WO 95/04818; McSwiggen et al., U.S. Pat. No. 5,525,468 and hereby incorporated by reference herein in totality. Rather than repeat the guidance provided in those documents here, below are provided specific examples of such methods, not limiting to other available methods known in the art. Nucleic acid molecules and nuclease activating compounds or chimeras to such targets are designed as described in those applications and synthesized to be tested in vitro and in vivo, as also described. Such nucleic acid molecules and nuclease activating compounds or chimeras can also be optimized and delivered as described therein.

[0141] The sequence of HCV RNAs were screened for optimal enzymatic nucleic acid molecule target sites using a computer folding algorithm. Enzymatic nucleic acid cleavage sites were identified. These sites are shown in Tables III, IV, V and VIII (All sequences are 5′ to 3′ in the tables). The nucleotide base position is noted in the tables as that site to be cleaved by the designated type of enzymatic nucleic acid molecule. The nucleotide base position is noted in the tables as that site to be cleaved by the designated type of enzymatic nucleic acid molecule.

[0142] Because HCV RNAs are highly homologous in certain regions, some enzymatic nucleic acid molecule target sites are also homologous. In this case, a single enzymatic nucleic acid molecule will target different classes of HCV RNA. The advantage of one enzymatic nucleic acid molecule that targets several classes of HCV RNA is clear, especially in cases where one or more of these RNAs can contribute to the disease state.

[0143] Enzymatic nucleic acid molecules were designed that could bind and were individually analyzed by computer folding (Jaeger et al., 1989 Proc. Natl. Acad. Sci. USA, 86, 7706) to assess whether the enzymatic nucleic acid molecule sequences fold into the appropriate secondary structure. Those enzymatic nucleic acid molecules with unfavorable intramolecular interactions between the binding arms and the catalytic core are eliminated from consideration. Varying binding arm lengths can be chosen to optimize activity. Generally, at least 4 bases on each arm are able to bind to, or otherwise interact with, the target RNA. Enzymatic nucleic acid molecules were designed to anneal to various sites in the mRNA message. The binding arms are complementary to the target site sequences described above.

[0144] Nucleic Acid Synthesis

[0145] Synthesis of nucleic acids greater than 100 nucleotides in length is difficult using automated methods, and the therapeutic cost of such molecules is prohibitive. In this invention, small nucleic acid motifs (“small refers to nucleic acid motifs no more than 100 nucleotides in length, preferably no more than 80 nucleotides in length, and most preferably no more than 50 nucleotides in length; e.g., antisense oligonucleotides, hammerhead or the Inozyme enzymatic nucleic acids) are preferably used for exogenous delivery. The simple structure of these molecules increases the ability of the nucleic acid to invade targeted regions of RNA structure. Exemplary molecules of the instant invention are chemically synthesized, and others can similarly be synthesized.

[0146] The method of synthesis used for normal RNA including certain enzymatic nucleic acid molecules follows the procedure as described in Usman et al., 1987, J. Am. Chem. Soc., 109, 7845; Scaringe et al., 1990, Nucleic Acids Res., 18, 5433; and Wincott et al., 1995, Nucleic Acids Res. 23, 2677-2684 Wincott et al., 1997, Methods Mol. Bio., 74, 59, and makes use of common nucleic acid protecting and coupling groups, such as dimethoxytrityl at the 5′-end, and phosphoramidites at the 3′-end. In a non-limiting example, small scale syntheses are conducted on a 394 Applied Biosystems, Inc. synthesizer using a 0.2 μmol scale protocol with a 7.5 min coupling step for alkylsilyl protected nucleotides and a 2.5 min coupling step for 2′-O-methylated nucleotides. Table II outlines the amounts and the contact times of the reagents used in the synthesis cycle. Alternatively, syntheses at the 0.2 μmol scale can be done on a 96-well plate synthesizer, such as the instrument produced by Protogene (Palo Alto, Calif.) with minimal modification to the cycle. A 33-fold excess (60 μL of 0.11 M=6.6 mol) of 2′-O-methyl phosphoramidite and a 75-fold excess of S-ethyl tetrazole (60 μL of 0.25 M=15 μmol) can be used in each coupling cycle of 2′-O-methyl residues relative to polymer-bound 5′-hydroxyl. A 66-fold excess (120 μL of 0.11 M=13.2 μmol) of alkylsilyl (ribo) protected phosphoramidite and a 150-fold excess of S-ethyl tetrazole (120 μL of 0.25 M=30 μmol) can be used in each coupling cycle of ribo residues relative to polymer-bound 5′-hydroxyl. Average coupling yields on the 394 Applied Biosystems, Inc. synthesizer, determined by colorimetric quantitation of the trityl fractions, are typically 97.5-99%. Other oligonucleotide synthesis reagents for the 394 Applied Biosystems, Inc. synthesizer include; detritylation solution is 3% TCA in methylene chloride (ABI); capping is performed with 16% N-methyl imidazole in THF (ABI) and 10% acetic anhydride/10% 2,6-lutidine in THF (ABI); oxidation solution is 16.9 mM I₂, 49 mM pyridine, 9% water in THF (PERSEPTIVE™). Burdick & Jackson Synthesis Grade acetonitrile is used directly from the reagent bottle. S-Ethyltetrazole solution (0.25 M in acetonitrile) is made up from the solid obtained from American International Chemical, Inc. Alternately, for the introduction of phosphorothioate linkages, Beaucage reagent (3H-1,2-Benzodithiol-3-one 1,1-dioxide 0.05 M in acetonitrile) is used.

[0147] Deprotection of the RNA is performed using either a two-pot or one-pot protocol. For the two-pot protocol, the polymer-bound trityl-on oligoribonucleotide is transferred to a 4 mL glass screw top vial and suspended in a solution of 40% aq. methylamine (1 mL) at 65° C. for 10 min. After cooling to −20° C., the supernatant is removed from the polymer support. The support is washed three times with 1.0 mL of EtOH:MeCN:H2O/3:1:1, vortexed and the supernatant is then added to the first supernatant. The combined supernatants, containing the oligoribonucleotide, are dried to a white powder. The base deprotected oligoribonucleotide is resuspended in anhydrous TEA/HF/NMP solution (300 μL of a solution of 1.5 mL N-methylpyrrolidinone, 750 μL TEA and 1 mL TEA-3HF to provide a 1.4 M HF concentration) and heated to 65° C. After 1.5 h, the oligomer is quenched with 1.5 M NH₄HCO₃.

[0148] Alternatively, for the one-pot protocol, the polymer-bound trityl-on oligoribonucleotide is transferred to a 4 mL glass screw top vial and suspended in a solution of 33% ethanolic methylamine/DMSO: 1/1 (0.8 mL) at 65° C. for 15 min. The vial is brought to r.t. TEA.3HF (0.1 mL) is added and the vial is heated at 65° C. for 15 min. The sample is cooled at −20° C. and then quenched with 1.5 M NH₄HCO₃.

[0149] For anion exchange desalting of the deprotected oligomer, the TEAB solution was loaded onto a Qiagen 500® anion exchange cartridge (Qiagen Inc.) that was prewashed with 50 mM TEAB (10 mL). After washing the loaded cartridge with 50 mM TEAB (10 mL), the RNA was eluted with 2 M TEAB (10 mL) and dried down to a white powder.

[0150] For purification of the trityl-on oligomers, the quenched NH₄HCO₃ solution is loaded onto a C-18 containing cartridge that had been prewashed with acetonitrile followed by 50 mM TEAA. After washing the loaded cartridge with water, the RNA is detritylated with 0.5% TFA for 13 min. The cartridge is then washed again with water, salt exchanged with 1 M NaCl and washed with water again. The oligonucleotide is then eluted with 30% acetonitrile.

[0151] Inactive hammerhead enzymatic nucleic acids were synthesized by substituting switching the order of G₅A₆ and substituting a U for A₁₄(numbering from Hertel, K. J., et al., 1992, Nucleic Acids Res., 20, 3252). Inactive enzymatic nucleic acids can also be synthesized by substituting a U for G5 and a U for A14. In some cases, the sequence of the substrate binding arms were randomized while the overall base composition was maintained.

[0152] The average stepwise coupling yields are typically >98% (Wincott et al, 1995 Nucleic Acids Res. 23, 2677-2684). Those of ordinary skill in the art will recognize that the scale of synthesis can be adapted to be larger or smaller than the example described above including but not limited to 96 well format, all that is important is the ratio of chemicals used in the reaction.

[0153] Enzymatic nucleic acid molecules can be synthesized in two parts and annealed to reconstruct the active enzymatic nucleic acid molecule (Chowrira and Burke, 1992 Nucleic Acids Res., 20, 2835-2840). Enzymatic nucleic acid molecules can also be synthesized from DNA templates using bacteriophage T7 RNA polymerase (Milligan and Uhlenbeck, 1989, Methods Enzymol. 180, 51). DNAzymes can be synthesized chemically or expressed endogenously in vivo, by means of a single stranded DNA vector or equivalent thereof.

[0154] Alternatively, the nucleic acid molecules of the present invention can be synthesized separately and joined together post-synthetically, for example by ligation (Moore et al., 1992, Science 256, 9923; Draper et al., International PCT publication No. WO 93/23569; Shabarova et al., 1991, Nucleic Acids Research 19, 4247; Bellon et al., 1997, Nucleosides & Nucleotides, 16, 951; Bellon et al., 1997, Bioconjugate Chem. 8, 204).

[0155] The nucleic acid molecules of the present invention are modified extensively to enhance stability by modification with nuclease resistant groups, for example, 2′-amino, 2′-C-allyl, 2′-flouro, 2′-O-methyl, 2′-H (for a review see Usman and Cedergren, 1992, TIBS 17, 34; Usman et al., 1994, Nucleic Acids Symp. Ser. 31, 163). Enzymatic nucleic acids are purified by gel electrophoresis using general methods or are purified by high pressure liquid chromatography (HPLC; See Wincott et al., Supra, the totality of which is hereby incorporated herein by reference) and are re-suspended in water.

[0156] The sequences of the nucleic acid molecules that are chemically synthesized, useful in this study, are shown in Tables V-VIII. Those in the art will recognize that these sequences are representative only of many more such sequences where the enzymatic portion of the enzymatic nucleic acid (all but the binding arms) is altered to affect activity. The nucleic acid sequences listed in Tables V-VIII can be formed of ribonucleotides or other nucleotides or non-nucleotides. Such nucleic acid molecules with enzymatic activity are equivalent to the enzymatic nucleic acid molecules described specifically in the tables.

[0157] Optimizing Activity of the Nucleic Acid Molecules of the Invention.

[0158] Chemically synthesizing nucleic acid molecules with modifications (base, sugar and/or phosphate) that prevent their degradation by serum ribonucleases can increase their potency (see e.g., Eckstein et al., International Publication No. WO 92/07065; Perrault et al., 1990 Nature 344, 565; Pieken et al., 1991, Science 253, 314; Usman and Cedergren, 1992, Trends in Biochem. Sci. 17, 334; Usman et al., International Publication No. WO 93/15187; and Rossi et al., International Publication No. WO 91/03162; Sproat, U.S. Pat. No. 5,334,711; and Burgin et al., supra; all of these describe various chemical modifications that can be made to the base, phosphate and/or sugar moieties of the nucleic acid molecules herein). Modifications which enhance their efficacy in cells, and removal of bases from nucleic acid molecules to shorten oligonucleotide synthesis times and reduce chemical requirements are desired. (All these publications are hereby incorporated by reference herein).

[0159] There are several examples in the art describing sugar, base and phosphate modifications that can be introduced into nucleic acid molecules with significant enhancement in their nuclease stability and efficacy. For example, oligonucleotides are modified to enhance stability and/or enhance biological activity by modification with nuclease resistant groups, for example, 2′-amino, 2′-C-allyl, 2′-flouro, 2′-O-methyl, 2′-H, nucleotide base modifications (for a review see Usman and Cedergren, 1992, TIBS. 17, 34; Usman et al. 1994, Nucleic Acids Symp. Ser. 31, 163; Burgin et al., 1996, Biochemistry, 35, 14090). Sugar modification of nucleic acid molecules have been extensively described in the art (see Eckstein et al., International Publication PCT No. WO 92/07065; Perrault et al. Nature, 1990, 344, 565-568; Pieken et al. Science, 1991, 253, 314-317; Usman and Cedergren, Trends in Biochem. Sci., 1992, 17, 334-339; Usman et al. International Publication PCT No. WO 93/15187; Sproat, U.S. Pat. No. 5,334,711 and Beigelman et al., 1995, J. Biol. Chem., 270, 25702; Beigelman et al., International PCT publication No. WO 97/26270; Beigelman et al., U.S. Pat. No. 5,716,824; Usman et al., U.S. Pat. No. 5,627,053; Woolf et al., International PCT Publication No. WO 98/13526; Thompson et al., U.S. Ser. No. 60/082,404 which was filed on Apr. 20, 1998; Karpeisky et al., 1998, Tetrahedron Lett., 39, 1131; Earnshaw and Gait, 1998, Biopolymers (Nucleic acid Sciences), 48, 39-55; Verma and Eckstein, 1998, Annu. Rev. Biochem., 67, 99-134; and Burlina et al., 1997, Bioorg. Med. Chem., 5, 1999-2010; all of the references are hereby incorporated in their totality by reference herein). Such publications describe general methods and strategies to determine the location of incorporation of sugar, base and/or phosphate modifications and the like into enzymatic nucleic acids without inhibiting catalysis, and are incorporated by reference herein. In view of such teachings, similar modifications can be used as described herein to modify the nucleic acid molecules of the instant invention.

[0160] While chemical modification of oligonucleotide internucleotide linkages with phosphorothioate, phosphorothioate, and/or 5′-methylphosphonate linkages improves stability, too many of these modifications can cause some toxicity. Therefore when designing nucleic acid molecules the amount of these internucleotide linkages should be minimized. The reduction in the concentration of these linkages should lower toxicity resulting in increased efficacy and higher specificity of these molecules.

[0161] Nucleic acid molecules having chemical modifications that maintain or enhance activity are provided. Such nucleic acid is also generally more resistant to nucleases than unmodified nucleic acid. Thus, in a cell and/or in vivo the activity can not be significantly lowered. Therapeutic nucleic acid molecules delivered exogenously should optimally be stable within cells until translation of the target RNA has been inhibited long enough to reduce the levels of the undesirable protein. This period of time varies between hours to days depending upon the disease state. Nucleic acid molecules should be resistant to nucleases in order to function as effective intracellular therapeutic agents. Improvements in the chemical synthesis of RNA and DNA (Wincott et al., 1995 Nucleic Acids Res. 23, 2677; Caruthers et al., 1992, Methods in Enzymology 211,3-19 (incorporated by reference herein) have expanded the ability to modify nucleic acid molecules by introducing nucleotide modifications to enhance their nuclease stability as described above.

[0162] Use of the nucleic acid-based molecules of the invention can lead to better treatment of the disease progression by affording the possibility of combination therapies (e.g., multiple antisense or enzymatic nucleic acid molecules targeted to different genes, nucleic acid molecules coupled with known small molecule inhibitors, or intermittent treatment with combinations of molecules (including different motifs) and/or other chemical or biological molecules). The treatment of patients with nucleic acid molecules can also include combinations of different types of nucleic acid molecules.

[0163] By “enhanced enzymatic activity” is meant to include activity measured in cells and/or in vivo where the activity is a reflection of both catalytic activity and enzymatic nucleic acid stability. In this invention, the product of these properties is increased or not significantly (less that 10 fold) decreased in vivo compared to an all RNA enzymatic nucleic acid or all DNA enzyme.

[0164] In another embodiment, nucleic acid catalysts having chemical modifications which maintain or enhance enzymatic activity is provided. Such nucleic acid is also generally more resistant to nucleases than unmodified nucleic acid. Thus, in a cell and/or in vivo the activity should not be significantly lowered. As exemplified herein, such enzymatic nucleic acids are useful in a cell and/or in vivo even if activity over all is reduced 10 fold (Burgin et al., 1996, Biochemistry, 35, 14090). Such enzymatic nucleic acids herein are said to “maintain” the enzymatic activity of an all RNA enzymatic nucleic acid.

[0165] In another aspect the nucleic acid molecules comprise a 5′ and/or a 3′-cap structure.

[0166] By “cap structure” is meant chemical modifications, which have been incorporated at either terminus of the oligonucleotide (see for example Wincott et al., WO 97/26270, incorporated by reference herein). These terminal modifications protect the nucleic acid molecule from exonuclease degradation, and can help in delivery and/or localization within a cell. The cap can be present at the 5′-terminus (5′-cap) or at the 3′-terminus (3′-cap) or can be present on both terminus. In non-limiting examples: the 5′-cap is selected from the group consisting of inverted abasic residue (moiety), 4′,5′-methylene nucleotide; 1-(beta-D-erythrofuranosyl) nucleotide, 4′-thio nucleotide, carbocyclic nucleotide; 1,5-anhydrohexitol nucleotide; L-nucleotides; alpha-nucleotides; modified base nucleotide; phosphorodithioate linkage; threo-pentofuranosyl nucleotide; acyclic 3′,4′-seco nucleotide; acyclic 3,4-dihydroxybutyl nucleotide; acyclic 3,5-dihydroxypentyl nucleotide, 3′-3′-inverted nucleotide moiety; 3′-3′-inverted abasic moiety; 3′-2′-inverted nucleotide moiety; 3′-2′-inverted abasic moiety; 1,4-butanediol phosphate; 3′-phosphoramidate; hexylphosphate; aminohexyl phosphate; 3′-phosphate; 3′-phosphorothioate; phosphorodithioate; or bridging or non-bridging methylphosphonate moiety (for more details see Wincott et al., International PCT publication No. WO 97/26270, incorporated by reference herein). In yet another preferred embodiment the 3′-cap is selected from a group comprising, 4′,5′-methylene nucleotide; 1-(beta-D-erythrofuranosyl) nucleotide; 4′-thio nucleotide, carbocyclic nucleotide; 5′-amino-alkyl phosphate; 1,3-diamino-2-propyl phosphate, 3-aminopropyl phosphate; 6-aminohexyl phosphate; 1,2-aminododecyl phosphate; hydroxypropyl phosphate; 1,5-anhydrohexitol nucleotide; L-nucleotide; alpha-nucleotide; modified base nucleotide; phosphorodithioate; threopentofuranosyl nucleotide; acyclic 3′,4′-seco nucleotide; 3,4-dihydroxybutyl nucleotide; 3,5-dihydroxypentyl nucleotide, 5′-5′-inverted nucleotide moiety; 5′-5′-inverted abasic moiety; 5′-phosphoramidate; 5′-phosphorothioate; 1,4-butanediol phosphate; 5′-amino; bridging and/or non-bridging 5′-phosphoramidate, phosphorothioate and/or phosphorodithioate, bridging or non bridging methylphosphonate and 5′-mercapto moieties (for more details see Beaucage and Iyer, 1993, Tetrahedron 49, 1925; incorporated by reference herein). By the term “non-nucleotide” is meant any group or compound which can be incorporated into a nucleic acid chain in the place of one or more nucleotide units, including either sugar and/or phosphate substitutions, and allows the remaining bases to exhibit their enzymatic activity. The group or compound is abasic in that it does not contain a commonly recognized nucleotide base, such as adenosine, guanine, cytosine, uracil or thymine.

[0167] An “alkyl” group refers to a saturated aliphatic hydrocarbon, including straight-chain, branched-chain, and cyclic alkyl groups. Preferably, the alkyl group has 1 to 12 carbons. More preferably it is a lower alkyl of from 1 to 7 carbons, more preferably 1 to 4 carbons. The alkyl group can be substituted or unsubstituted. When substituted the substituted group(s) is preferably, hydroxyl, cyano, alkoxy, ═O, ═S, NO₂ or N(CH₃)₂, amino, or SH. The term also includes alkenyl groups which are unsaturated hydrocarbon groups containing at least one carbon-carbon double bond, including straight-chain, branched-chain, and cyclic groups. Preferably, the alkenyl group has 1 to 12 carbons. More preferably it is a lower alkenyl of from 1 to 7 carbons, more preferably 1 to 4 carbons. The alkenyl group can be substituted or unsubstituted. When substituted the substituted group(s) is preferably, hydroxyl, cyano, alkoxy, ═O, ═S, NO₂, halogen, N(CH₃)₂, amino, or SH. The term “alkyl” also includes alkynyl groups which have an unsaturated hydrocarbon group containing at least one carbon-carbon triple bond, including straight-chain, branched-chain, and cyclic groups. Preferably, the alkynyl group has 1 to 12 carbons. More preferably it is a lower alkynyl of from 1 to 7 carbons, more preferably 1 to 4 carbons. The alkynyl group can be substituted or unsubstituted. When substituted the substituted group(s) is preferably, hydroxyl, cyano, alkoxy, ═O, ═S, NO₂ or N(CH₃)₂, amino or SH.

[0168] Such alkyl groups can also include amine, aryl, alkylaryl, carbocyclic aryl, heterocyclic aryl, amide and ester groups. An “aryl” group refers to an aromatic group which has at least one ring having a conjugated p electron system and includes carbocyclic aryl, heterocyclic aryl and biaryl groups, all of which can be optionally substituted. The preferred substituent(s) of aryl groups are halogen, trihalomethyl, hydroxyl, SH, OH, cyano, alkoxy, alkyl, alkenyl, alkynyl, and amino groups. An “alkylaryl” group refers to an alkyl group (as described above) covalently joined to an aryl group (as described above). Carbocyclic aryl groups are groups wherein the ring atoms on the aromatic ring are all carbon atoms. The carbon atoms are optionally substituted. Heterocyclic aryl groups are groups having from 1 to 3 heteroatoms as ring atoms in the aromatic ring and the remainder of the ring atoms are carbon atoms. Suitable heteroatoms include oxygen, sulfur, and nitrogen, and include furanyl, thienyl, pyridyl, pyrrolyl, N-lower alkyl pyrrolo, pyrimidyl, pyrazinyl, imidazolyl and the like, all optionally substituted. An “amide” refers to an —C(O)—NH—R, where R is either alkyl, aryl, alkylaryl or hydrogen. An “ester” refers to an —C(O)—OR′, where R is either alkyl, aryl, alkylaryl or hydrogen.

[0169] By “nucleotide” as used herein is as recognized in the art to include natural bases (standard), and modified bases well known in the art. Such bases are generally located at the 1′ position of a nucleotide sugar moiety. Nucleotides generally comprise a base, sugar and a phosphate group. The nucleotides can be unmodified or modified at the sugar, phosphate and/or base moiety, (also referred to interchangeably as nucleotide analogs, modified nucleotides, non-natural nucleotides, non-standard nucleotides and other; see, for example, Usman and McSwiggen, supra; Eckstein et al, International PCT Publication No. WO 92/07065; Usman et al., International PCT Publication No. WO 93/15187; Ulhlman & Peyman, supra all are hereby incorporated by reference herein). There are several examples of modified nucleic acid bases known in the art as summarized by Limbach et al, 1994, Nucleic Acids Res. 22, 2183. Some of the non-limiting examples of base modifications that can be introduced into nucleic acid molecules include, inosine, purine, pyridin-4-one, pyridin-2-one, phenyl, pseudouracil, 2, 4, 6-trimethoxy benzene, 3-methyl uracil, dihydrouridine, naphthyl, aminophenyl, 5-alkylcytidines (e.g., 5-methylcytidine), 5-alkyluridines (e.g., ribothymidine), 5-halouridine (e.g., 5-bromouridine) or 6-azapyrimidines or 6-alkylpyrimidines (e.g. 6-methyluridine), propyne, and others (Burgin et al., 1996, Biochemistry, 35, 14090; Uhlman & Peyman, supra). By “modified bases” in this aspect is meant nucleotide bases other than adenine, guanine, cytosine and uracil at 1′ position or their equivalents; such bases can be used at any position, for example, within the catalytic core of an enzymatic nucleic acid molecule and/or in the substrate-binding regions of the nucleic acid molecule.

[0170] In one embodiment, the invention features modified nucleic acids with phosphate backbone modifications comprising one or more phosphorothioate, phosphorodithioate, methylphosphonate, morpholino, amidate carbamate, carboxymethyl, acetamidate, polyamide, sulfonate, sulfonamide, sulfamate, formacetal, thioformacetal, and/or alkylsilyl, substitutions. For a review of oligonucleotide backbone modifications see Hunziker and Leumann, 1995, Nucleic Acid Analogues: Synthesis and Properties, in Modern Synthetic Methods, VCH, 331-417, and Mesmaeker et al., 1994, Novel Backbone Replacements for Oligonucleotides, in Carbohydrate Modifications in Antisense Research, ACS, 24-39. These references are hereby incorporated by reference herein.

[0171] By “abasic” or “abasic moiety” is meant sugar moieties lacking a base or having other chemical groups in place of a base at the 1′ position, (see Wincott et al., International PCT publication No. WO 97/26270).

[0172] By “ribofuranose sugar moiety” is meant a naturally occurring or chemically modified component of a ribofuranose sugar.

[0173] By “bridging phosphate moiety” is meant a naturally occurring or chemically modified bridging component of a phosphate group.

[0174] By “non-bridging phosphate moiety” is meant a naturally occurring or chemically modified non-bridging component of a phosphate group.

[0175] By “unmodified nucleoside” is meant one of the bases adenine, cytosine, guanine, thymine, uracil joined to the 1′ carbon of β-D-ribo-furanose.

[0176] By “modified nucleoside” is meant any nucleotide base which contains a modification in the chemical structure of an unmodified nucleotide base, sugar and/or phosphate.

[0177] In connection with 2′-modified nucleotides as described for the present invention, by “amino” is meant 2′-NH₂ or 2′-O—NH₂, which can be modified or unmodified. Such modified groups are described, for example, in Eckstein et al., U.S. Pat. No. 5,672,695 and Matulic-Adamic et al., WO 98/28317, respectively, which are both incorporated by reference in their entireties.

[0178] Various modifications to nucleic acid (e.g., antisense and enzymatic nucleic acid) structure can be made to enhance the utility of these molecules, including, for example, modifications that enhance shelf-life, half-life in vitro, stability, and ease of introduction of such oligonucleotides to the target site, e.g., to enhance penetration of cellular membranes, and confer the ability to recognize and bind to targeted cells.

[0179] Use of these molecules can lead to better treatment of the disease progression by affording the possibility of combination therapies (e.g., multiple enzymatic nucleic acids targeted to different genes, enzymatic nucleic acids coupled with known small molecule inhibitors, or intermittent treatment with combinations of enzymatic nucleic acids (including different enzymatic nucleic acid motifs) and/or other chemical or biological molecules. The treatment of patients with nucleic acid molecules can also include combinations of different types of nucleic acid molecules. Therapies can be devised which include a mixture of enzymatic nucleic acids (including different enzymatic nucleic acid motifs), antisense and/or 2-5A chimera molecules to one or more targets to alleviate symptoms of a disease.

[0180] Administration of Nucleic Acid Molecules

[0181] Sullivan et al., PCT WO 94/02595, describes the general methods for delivery of enzymatic nucleic acid molecules. Nucleic acid molecules can be administered to cells by a variety of methods known to those familiar to the art, including, but not restricted to, encapsulation in liposomes, by iontophoresis, or by incorporation into other vehicles, such as hydrogels, cyclodextrins, biodegradable nanocapsules, and bioadhesive microspheres. For some indications, enzymatic nucleic acids can be directly delivered ex vivo to cells or tissues with or without the aforementioned vehicles. Alternatively, the RNA/vehicle combination is locally delivered by direct injection or by use of a catheter, infusion pump, stent or other delivery devices such as Alzet® pumps, Medipad® devices. Other routes of delivery include, but are not limited to, intravascular, intramuscular, subcutaneous or joint injection, aerosol inhalation, oral (tablet or pill form), topical, systemic, ocular, intraperitoneal and/or intrathecal delivery. More detailed descriptions of enzymatic nucleic acid delivery and administration are provided in Sullivan et al., supra and Draper et a., PCT WO93/23569 which have been incorporated by reference herein.

[0182] The molecules of the instant invention can be used as pharmaceutical agents. Pharmaceutical agents prevent, inhibit the occurrence, or treat (alleviate a symptom to some extent, preferably all of the symptoms) of a disease state in a patient.

[0183] The negatively charged polynucleotides of the invention can be administered (e.g., RNA, DNA or protein) and introduced into a patient by any standard means known in the art, with or without stabilizers, buffers, and the like, to form a pharmaceutical composition. When it is desired to use a lipid or liposome delivery mechanism, standard protocols for formulation can be followed. The compositions of the present invention can also be formulated and used as tablets, capsules or elixirs for oral administration; suppositories for rectal administration; sterile solutions; suspensions for injectable administration; and the like.

[0184] The present invention also includes pharmaceutically acceptable formulations of the compounds described. These formulations include salts of the above compounds, e.g., acid addition salts, for example, salts of hydrochloric, hydrobromic, acetic acid, and benzene sulfonic acid.

[0185] A pharmacological composition or formulation refers to a composition or formulation in a form suitable for administration, e.g., systemic administration, into a cell or patient, preferably a human. Suitable forms, in part, depend upon the use or the route of entry, for example oral, transdermal, or by injection. Such forms should not prevent the composition or formulation to reach a target cell (i.e., a cell to which the negatively charged polymer is desired to be delivered to). For example, pharmacological compositions injected into the blood stream should be soluble. Other factors are known in the art, and include considerations such as toxicity and forms which prevent the composition or formulation from exerting its effect.

[0186] By “systemic administration” is meant in vivo systemic absorption or accumulation of drugs in the blood stream followed by distribution throughout the entire body. Administration routes which lead to systemic absorption include, without limitations: intravenous, subcutaneous, intraperitoneal, inhalation, oral, intrapulmonary and intramuscular. Each of these administration routes expose the desired negatively charged polymers, e.g., nucleic acids, to an accessible diseased tissue. The rate of entry of a drug into the circulation has been shown to be a function of molecular weight or size. The use of a liposome or other drug carrier comprising the compounds of the instant invention can potentially localize the drug, for example, in certain tissue types, such as the tissues of the reticular endothelial system (RES). A liposome formulation which facilitates the association of drug with the surface of cells, such as, lymphocytes and macrophages is also useful. This approach can provide enhanced delivery of the drug to target cells by taking advantage of the specificity of macrophage and lymphocyte immune recognition of abnormal cells, such as HCV infected liver cells.

[0187] In one embodiment, the invention features the use of a composition comprising surface-modified liposomes containing poly (ethylene glycol) lipids (PEG-modified, or long-circulating liposomes or stealth liposomes). These formulations offer a method for increasing the accumulation of drugs in target tissues. This class of drug carriers resists opsonization and elimination by the mononuclear phagocytic system (MPS or RES), thereby enabling longer blood circulation times and enhanced tissue exposure for the encapsulated drug (Lasic et al. Chem. Rev. 1995, 95, 2601-2627; Ishiwata et al., Chem. Pharm. Bull. 1995, 43, 1005-1011). Such liposomes have been shown to accumulate selectively in tumors, presumably by extravasation and capture in the neovascularized target tissues (Lasic et al., Science 1995, 267, 1275-1276; Oku et al., 1995, Biochim. Biophys. Acta, 1238, 86-90). The long-circulating liposomes enhance the pharmacokinetics and pharmacodynamics of DNA and RNA, particularly compared to conventional cationic liposomes which are known to accumulate in tissues of the MPS (Liu et al., J. Biol. Chem. 1995, 42, 24864-24870; Choi et al, International PCT Publication No. WO 96/10391; Ansell et al., International PCT Publication No. WO 96/10390; Holland et al., International PCT Publication No. WO 96/10392; all of the se are incorporated by reference herein). All of these references are incorporated by reference herein.

[0188] In addition, other cationic molecules can also be utilized to deliver the molecules of the present invention. For example, enzymatic nucleic acid molecules can be conjugated to glycosylated poly(L-lysine) which has been shown to enhance localization of antisense oligonucleotides into the liver (Nakazono et al., 1996, Hepatology 23, 1297-1303; Nahato et al., 1997, Biochem Pharm. 53, 887-895). Glycosylated poly(L-lysine) can be covertly attached to the enzymatic nucleic acid or be bound to enzymatic nucleic acid through electrostatic interaction.

[0189] The present invention also includes compositions prepared for storage or administration which include a pharmaceutically effective amount of the desired compounds in a pharmaceutically acceptable carrier or diluent. Acceptable carriers or diluents for therapeutic use are well known in the pharmaceutical art, and are described, for example, in Remington's Pharmaceutical Sciences, Mack Publishing Co. (A. R. Gennaro edit. 1985) hereby incorporated by reference herein. For example, preservatives, stabilizers, dyes and flavoring agents can be provided. Id. at 1449. These include sodium benzoate, sorbic acid and esters of p-hydroxybenzoic acid. In addition, antioxidants and suspending agents can be used.

[0190] A pharmaceutically effective dose is that dose required to prevent, inhibit the occurrence, or treat (alleviate a symptom to some extent, preferably all of the symptoms) a disease state. The pharmaceutically effective dose depends on the type of disease, the composition used, the route of administration, the type of mammal being treated, the physical characteristics of the specific mammal under consideration, concurrent medication, and other factors which those skilled in the medical arts will recognize. Generally, an amount between 0.1 mg/kg and 100 mg/kg body weight/day of active ingredients is administered dependent upon potency of the negatively charged polymer.

[0191] The nucleic acid molecules of the present invention can also be administered to a patient in combination with other therapeutic compounds to increase the overall therapeutic effect. The use of multiple compounds to treat an indication can increase the beneficial effects while reducing the presence of side effects.

[0192] Alternatively, the enzymatic nucleic acid molecules of the instant invention can be expressed within cells from eukaryotic promoters (e.g., Izant and Weintraub, 1985 Science 229, 345; McGarry and Lindquist, 1986 Proc. Natl. Acad. Sci. USA 83, 399; Scanlon et al., 1991, Proc. Natl. Acad. Sci. USA, 88, 10591-5; Kashani-Sabet et al., 1992 Antisense Res. Dev., 2, 3-15; Dropulic et al., 1992 J. Virol, 66, 1432-41; Weerasinghe et al., 1991 J. Virol, 65, 5531-4; Ojwang et al., 1992 Proc. Natl. Acad. Sci. USA 89, 10802-6; Chen et al., 1992 Nucleic Acids Res., 20, 4581-9; Sarver et al., 1990 Science 247, 1222-1225; Thompson et al., 1995 Nucleic Acids Res. 23, 2259; Good et al., 1997, Gene Therapy, 4, 45; all of the references are hereby incorporated in their totality by reference herein). Those skilled in the art realize that any nucleic acid can be expressed in eukaryotic cells from the appropriate DNA/RNA vector. The activity of such nucleic acids can be augmented by their release from the primary transcript by an enzymatic nucleic acid (Draper et al., PCT WO 93/23569, and Sullivan et al., PCT WO 94/02595; Ohkawa et al., 1992 Nucleic Acids Symp. Ser., 27, 15-6; Taira et al., 1991, Nucleic Acids Res., 19, 5125-30; Ventura et al., 1993 Nucleic Acids Res., 21, 3249-55; Chowrira et al., 1994 J. Biol. Chem. 269, 25856; all of the references are hereby incorporated in their totality by reference herein).

[0193] In another aspect of the invention, nucleic acid molecules that cleave target molecules are expressed from transcription units (see for example Couture et al., 1996, TIG., 12, 510) inserted into DNA or RNA vectors. The recombinant vectors are preferably DNA plasmids or viral vectors. Nucleic acid molecule expressing viral vectors can be constructed based on, but not limited to, adeno-associated virus, retrovirus, adenovirus, or alphavirus. Preferably, the recombinant vectors capable of expressing the nucleic acid molecules are delivered as described above, and persist in target cells. Alternatively, viral vectors can be used that provide for transient expression of nucleic acid molecules. Such vectors can be repeatedly administered as necessary. Once expressed, the nucleic acid molecules cleave the target mRNA. The active nucleic acid molecule can contain an enzymatic center or core equivalent to those in the examples, and binding arms able to bind target nucleic acid molecules such that cleavage at the target site occurs. Other sequences can be present which do not interfere with such cleavage. Delivery of enzymatic nucleic acid molecule expressing vectors could be systemic, such as by intravenous or intramuscular administration, by administration to target cells ex-planted from the patient followed by reintroduction into the patient, or by any other means that would allow for introduction into the desired target cell (for a review see Couture et al., 1996, TIG., 12, 510).

[0194] In one aspect the invention features an expression vector comprising nucleic acid sequence encoding at least one of the nucleic acid catalyst of the instant invention is disclosed. The nucleic acid sequence encoding the nucleic acid catalyst of the instant invention is operable linked in a manner that allows expression of that nucleic acid molecule.

[0195] In another aspect the invention features an expression vector comprising: a) a transcription initiation region (e.g., eukaryotic pol I, II or III initiation region); b) a transcription termination region (e.g., eukaryotic pol I, II or III termination region); c) a nucleic acid sequence encoding at least one of the nucleic acid catalyst of the instant invention; and wherein said sequence is operably linked to said initiation region and said termination region, in a manner which allows expression and/or delivery of said nucleic acid molecule. The vector can optionally include an open reading frame (ORF) for a protein operably linked on the 5′ side or the 3′-side of the sequence encoding the nucleic acid catalyst of the invention; and/or an intron (intervening sequences).

[0196] Transcription of the nucleic acid molecule sequences are driven from a promoter for eukaryotic RNA polymerase I (pol I), RNA polymerase II (pol II), or RNA polymerase III (pol III). Transcripts from pol II or pol III promoters are expressed at high levels in all cells; the levels of a given pol II promoter in a given cell type depends on the nature of the gene regulatory sequences (enhancers, silencers, etc.) present nearby. Prokaryotic RNA polymerase promoters are also used, providing that the prokaryotic RNA polymerase enzyme is expressed in the appropriate cells (Elroy-Stein and Moss, 1990, Proc. Natl. Acad. Sci. U S A, 87, 6743-7; GAO and Huang 1993, Nucleic Acids Res., 21, 2867-72; Lieber et al., 1993, Methods Enzymol., 217, 47-66; Shout et al., 1990, Mol. Cell. Biol., 10, 4529-37). All of these references are incorporated by reference herein. Several investigators have demonstrated that nucleic acid molecules, such as enzymatic nucleic acids expressed from such promoters can function in mammalian cells (e.g. Kashani-Sabet et al., 1992, Antisense Res. Dev., 2, 3-15; Ojwang et al., 1992, Proc. Natl. Acad. Sci. U S A, 89, 10802-6; Chen et al., 1992, Nucleic Acids Res., 20, 4581-9; Yu et al., 1993, Proc. Natl. Acad. Sci. USA, 90, 6340-4; L'Huillier et al., 1992, EMBO J, 11, 4411-8; Lisziewicz et al., 1993, Proc. Natl. Acad. Sci. U.S. A, 90, 8000-4; Thompson et al., 1995, Nucleic Acids Res., 23, 2259; Sullenger & Cech, 1993, Science, 262, 1566). More specifically, transcription units such as the ones derived from genes encoding U6 small nuclear (snRNA), transfer RNA (tRNA) and adenovirus VA RNA are useful in generating high concentrations of desired RNA molecules such as enzymatic nucleic acids in cells (Thompson et al., supra; Couture and Stinchcomb, 1996, supra; Noonberg et al., 1994, Nucleic Acid Res., 22, 2830; Noonberg et al., U.S. Pat. No. 5,624,803; Good et al., 1997, Gene Ther., 4, 45; Beigelman et al., International PCT Publication No. WO 96/18736; all of these publications are incorporated by reference herein. The above enzymatic nucleic acid molecule transcription units can be incorporated into a variety of vectors for introduction into mammalian cells, including but not restricted to, plasmid DNA vectors, viral DNA vectors (such as adenovirus or adeno-associated virus vectors), or viral RNA vectors (such as retroviral or alphavirus vectors) (for a review see Couture and Stinchcomb, 1996, supra).

[0197] In another aspect the invention features an expression vector comprising nucleic acid sequence encoding at least one of the nucleic acid molecules of the invention, in a manner which allows expression of that nucleic acid molecule. The expression vector comprises in one embodiment; a) a transcription initiation region; b) a transcription termination region; c) a nucleic acid sequence encoding at least one said nucleic acid molecule; and wherein said sequence is operably linked to said initiation region and said termination region, in a manner which allows expression and/or delivery of said nucleic acid molecule. In another preferred embodiment the expression vector comprises: a) a transcription initiation region; b) a transcription termination region; c) an open reading frame; d) a nucleic acid sequence encoding at least one said nucleic acid molecule, wherein said sequence is operably linked to the 3′-end of said open reading frame; and wherein said sequence is operably linked to said initiation region, said open reading frame and said termination region, in a manner which allows expression and/or delivery of said nucleic acid molecule. In yet another embodiment the expression vector comprises: a) a transcription initiation region; b) a transcription termination region; c) an intron; d) a nucleic acid sequence encoding at least one said nucleic acid molecule; and wherein said sequence is operably linked to said initiation region, said intron and said termination region, in a manner which allows expression and/or delivery of said nucleic acid molecule. In another embodiment, the expression vector comprises: a) a transcription initiation region; b) a transcription termination region; c) an intron; d) an open reading frame; e) a nucleic acid sequence encoding at least one said nucleic acid molecule, wherein said sequence is operably linked to the 3′-end of said open reading frame; and wherein said sequence is operably linked to said initiation region, said intron, said open reading frame and said termination region, in a manner which allows expression and/or delivery of said nucleic acid molecule.

[0198] Interferons

[0199] Type I interferons (IFN) are a class of natural cytokines that includes a family of greater than 25 IFN-α (Pesta, 1986, Methods Enzymol. 119, 3-14) as well as IFN-β, and IFN-ω. Although evolutionarily derived from the same gene (Diaz et al., 1994, Genomics 22, 540-552), there are many differences in the primary sequence of these molecules, implying an evolutionary divergence in biologic activity. All type I IFN share a common pattern of biologic effects that begin with binding of the IFN to the cell surface receptor (Pfeffer & Strulovici, 1992, Transmembrane secondary messengers for IFN-α/β. In: Interferon. Principles and Medical Applications., S. Baron, D. H. Coopenhaver, F. Dianzani, W. R. Fleischmann Jr., T. K. Hughes Jr., G. R. Kimpel, D. W. Niesel, G. J. Stanton, and S. K. Tyring, eds. 151-160). Binding is followed by activation of tyrosine kinases, including the Janus tyrosine kinases and the STAT proteins, which leads to the production of several IFN-stimulated gene products (Johnson et al., 1994, Sci. Am. 270, 68-75). The IFN-stimulated gene products are responsible for the pleotropic biologic effects of type I IFN, including antiviral, antiproliferative, and immunomodulatory effects, cytokine induction, and HLA class I and class II regulation (Pestka et al., 1987, Annu. Rev. Biochem 56, 727). Examples of IFN-stimulated gene products include 2-5-oligoadenylate synthetase (2-5 OAS), β₂-microglobulin, neopterin, p68 kinases, and the Mx protein (Chebath & Revel, 1992, The 2-5 A system: 2-5 A synthetase, isospecies and functions. In: Interferon. Principles and Medical Applications. S. Baron, D. H. Coopenhaver, F. Dianzani, W. R. Jr. Fleischmann, T. K. Jr Hughes, G. R. Kimpel, D. W. Niesel, G. J. Stanton, and S. K. Tyring, eds., pp. 225-236; Samuel, 1992, The RNA-dependent P1/eIF-2α protein kinase. In: Interferon. Principles and Medical Applications. S. Baron, D. H. Coopenhaver, F. Dianzani, W. R. Fleischmann Jr., T. K. Hughes Jr., G. R. Kimpel, D. W. Niesel, G. H. Stanton, and S. K. Tyring, eds. 237-250; Horisberger, 1992, MX protein: function and Mechanism of Action. In: Interferon. Principles and Medical Applications. S. Baron, D. H. Coopenhaver, F. Dianzani, W. R. Fleischmann Jr., T. K. Hughes Jr., G. R. Kimpel, D. W. Niesel, G. H. Stanton, and S. K. Tyring, eds. 215-224). Although all type I IFN have similar biologic effects, not all the activities are shared by each type I IFN, and, in many cases, the extent of activity varies quite substantially for each IFN subtype (Fish et al, 1989, J. Interferon Res. 9, 97-114; Ozes et al., 1992, J. Interferon Res. 12, 55-59). More specifically, investigations into the properties of different subtypes of IFN-α and molecular hybrids of IFN-α have shown differences in pharmacologic properties (Rubinstein, 1987, J. Interferon Res. 7, 545-551). These pharmacologic differences can arise from as few as three amino acid residue changes (Lee et al., 1982, Cancer Res. 42, 1312-1316).

[0200] Eighty-five to 166 amino acids are conserved in the known IFN-α subtypes. Excluding the IFN-α pseudogenes, there are approximately 25 known distinct IFN-α subtypes. Pairwise comparisons of these nonallelic subtypes show primary sequence differences ranging from 2% to 23%. In addition to the naturally occurring IFNs, a non-natural recombinant type I interferon known as consensus interferon (CIFN) has been synthesized as a therapeutic compound (Tong et al., 1997, Hepatology 26, 747-754).

[0201] Interferon is currently in use for at least 12 different indications including infectious and autoimmune diseases and cancer (Borden, 1992, N. Engl. J. Med. 326, 1491-1492). For autoimmune diseases IFN has been utilized for treatment of rheumatoid arthritis, multiple sclerosis, and Crohn's disease. For treatment of cancer IFN has been used alone or in combination with a number of different compounds. Specific types of cancers for which IFN has been used include squamous cell carcinomas, melanomas, hypernephromas, hemangiomas, hairy cell leukemia, and Kaposi's sarcoma. In the treatment of infectious diseases, IFNs increase the phagocytic activity of macrophages and cytotoxicity of lymphocytes and inhibits the propagation of cellular pathogens. Specific indications for which IFN has been used as treatment include: hepatitis B, human papillomavirus types 6 and 11 (i.e. genital warts) (Leventhal et al., 1991, N Engl J Med 325, 613-617), chronic granulomatous disease, and hepatitis C virus.

[0202] Numerous well controlled clinical trials using IFN-alpha in the treatment of chronic HCV infection have demonstrated that treatment three times a week results in lowering of serum ALT values in approximately 50% (range 40% to 70%) of patients by the end of 6 months of therapy (Davis et al., 1989, The new England Journal of Medicine 321, 1501-1506; Marcellin et al., 1991, Hepatology 13, 393-397; Tong et al., 1997, Hepatology 26, 747-754; Tong et al., Hepatology 26, 1640-1645). However, following cessation of interferon treatment, approximately 50% of the responding patients relapsed, resulting in a “durable” response rate as assessed by normalization of serum ALT concentrations of approximately 20 to 25%. In addition, studies that have examined six months of type 1 interferon therapy using changes in HCV RNA values as a clinical endpoint have demonstrated that up to 35% of patients will have a loss of HCV RNA by the end of therapy (Tong et al., 1997, supra). However, as with the ALT endpoint, about 50% of the patients relapse six months following cessation of therapy resulting in a durable virologic response of only 12% (23). Studies that have examined 48 weeks of therapy have demonstrated that the sustained virological response is up to 25%.

[0203] Pegylated interferons, i.e. interferons conjugated with polyethylene glycol (PEG), have demonstrated improved characteristics over interferon. Advantages incurred by PEG conjugation can include an improved pharmacokinetic profile compared to interferons lacking PEG, thus imparting more convenient dosing regimes, improved tolerance, and improved antiviral efficacy. Such improvements have been demonstrated in clinical studies of both polyethylene glycol interferon alfa-2a (PEGASYS, Roche) and polyethylene glycol interferon alfa-2b (VIRAFERON PEG, PEG-INTRON, Enzon/Schering Plough).

[0204] Enzymatic nucleic acid molecules in combination with interferons and polyethylene glycol interferons have the potential to improve the effectiveness of treatment of HCV or any of the other indications discussed above. Enzymatic nucleic acid molecules targeting RNAs associated with diseases such as infectious diseases, autoimmune diseases, and cancer, can be used individually or in combination with other therapies such as interferons and polyethylene glycol interferons and to achieve enhanced efficacy.

### EXAMPLES

[0205] The following are non-limiting examples showing the selection, isolation, synthesis and activity of enzymatic nucleic acids of the instant invention.

[0206] The following examples demonstrate the use of enzymatic nucleic acid molecules that cleave HCV RNA. The methods described herein represent a scheme by which nucleic acid molecules can be derived that cleave other RNA targets required for HCV replication.

### Example 1

### Identification of Potential Enzymatic Nucleic Acid Molecules Cleavage Sites in HCV RNA

[0207] The sequence of HCV RNA was screened for accessible sites using a computer folding algorithm. Regions of the mRNA that did not form secondary folding structures and contained potential enzymatic nucleic acid cleavage sites were identified. The sequences of these cleavage sites are shown in Tables III, IV, V and VIII.

### Example 2

### Selection of Enzymatic Nucleic Acid Molecules Cleavage Sites in HCV RNA

[0208] Enzymatic nucleic acid target sites were chosen by analyzing sequences of Human HCV (Genbank accession Nos: D11168, D50483.1, L38318 and S82227) and prioritizing the sites on the basis of folding. Enzymatic nucleic acid molecules are designed that could bind each target and are individually analyzed by computer folding (Christoffersen et al., 1994 J. Mol. Struc. Theochem, 311, 273; Jaeger et al., 1989, Proc. Natl. Acad. Sci. USA, 86, 7706) to assess whether the enzymatic nucleic acid molecules sequences fold into the appropriate secondary structure. Those enzymatic nucleic acid molecules with unfavorable intramolecular interactions between the binding arms and the catalytic core can be eliminated from consideration. As noted below, varying binding arm lengths can be chosen to optimize activity. Generally, at least 4 bases on each arm are able to bind to, or otherwise interact with, the target RNA.

### Example 3

### Chemical Synthesis and Purification of Enzymatic Nucleic Acids

[0209] Enzymatic nucleic acid molecules are designed to anneal to various sites in the RNA message. The binding arms of the enzymatic nucleic acid molecules are complementary to the target site sequences described above. The enzymatic nucleic acid molecules can be chemically synthesized using, for example, RNA syntheses such as those described above and those described in Usman et al., (1987 J. Am. Chem. Soc., 109, 7845), Scaringe et al., (1990 Nucleic Acids Res., 18, 5433) and Wincott et al., supra. Such methods make use of common nucleic acid protecting and coupling groups, such as dimethoxytrityl at the 5′-end, and phosphoramidites at the 3′-end. The average stepwise coupling yields are typically >98%. Enzymatic nucleic acid molecules can be modified to enhance stability by modification with nuclease resistant groups, for example, 2′-amino, 2′-C-allyl, 2′-flouro, 2′-O-methyl, 2′-H (for a review see Usman and Cedergren, 1992 TIBS 17, 34).

[0210] Enzymatic nucleic acid molecules can also be synthesized from DNA templates using bacteriophage T7 RNA polymerase (Milligan and Uhlenbeck, 1989, Methods Enzymol. 180, 51). Enzymatic nucleic acid molecules can be purified by gel electrophoresis using known methods, or can be purified by high pressure liquid chromatography (HPLC; See Wincott et al., supra; the totality of which is hereby incorporated herein by reference), and are resuspended in water. The sequences of chemically synthesized enzymatic nucleic acid constructs are shown below in Tables V and VI. The antisense nucleic acid molecules shown in Table VII were chemically synthesized.

[0211] Inactive enzymatic nucleic acid molecules, for example inactive hammerhead enzymatic nucleic acids, can be synthesized by substituting the order of G5A6 and substituting a U for A14 (numbering from Hertel et al., 1992 Nucleic Acids Res., 20, 3252).

### Example 4

### Enzymatic Nucleic Acid Cleavage of HCV RNA Target in vitro

[0212] Enzymatic nucleic acid molecules targeted to the HCV are designed and synthesized as described above. These enzymatic nucleic acid molecules can be tested for cleavage activity in vitro, for example, using the following procedure. The target sequences and the nucleotide location within the HCV are given in Tables V and VIII.

[0213] Cleavage Reactions:

[0214] Full-length or partially full-length, internally-labeled target RNA for enzymatic nucleic acid molecule cleavage assay is prepared by in vitro transcription in the presence of [α-32p] CTP, passed over a G 50 Sephadex column by spin chromatography and used as substrate RNA without further purification. Alternately, substrates are 5′-³²P-end labeled using T4 polynucleotide kinase enzyme. Assays are performed by pre-wanning a 2× concentration of purified enzymatic nucleic acid molecule in enzymatic nucleic acid molecule cleavage buffer (50 mM Tris-HCl, pH 7.5 at 37° C., 10 mM MgCl₂) and the cleavage reaction was initiated by adding the 2× enzymatic nucleic acid molecule mix to an equal volume of substrate RNA (maximum of 1-5 nM) that was also pre-warmed in cleavage buffer. As an initial screen, assays are carried out for 1 hour at 37° C. using a final concentration of either 40 nM or 1 mM enzymatic nucleic acid molecule, i.e., enzymatic nucleic acid molecule excess. The reaction is quenched by the addition of an equal volume of 95% formamide, 20 mM EDTA, 0.05% bromophenol blue and 0.05% xylene cyanol after which the sample is heated to 95° C. for 2 minutes, quick chilled and loaded onto a denaturing polyacrylamide gel. Substrate RNA and the specific RNA cleavage products generated by enzymatic nucleic acid molecule cleavage are visualized on an autoradiograph of the gel. The percentage of cleavage is determined by Phosphor Imager® quantitation of bands representing the intact substrate and the cleavage products.

[0215] Alternatively, enzymatic nucleic acid molecules and substrates were synthesized in 96-well format using 0.2 μmol scale. Substrates were 5′-³²p labeled and gel purified using 7.5% polyacrylamide gels, and eluting into water. Assays were done by combining trace substrate with 500 nM enzymatic nucleic acid or greater, and initiated by adding final concentrations of 40 mM Mg⁺², and 50 mM Tris-Cl pH 8.0. For each enzymatic nucleic acid/substrate combination a control reaction was done to ensure cleavage was not the result of non-specific substrate degradation. A single three hour time point was taken and run on a 15% polyacrylamide gel to asses cleavage activity. Gels were dried and scanned using a Molecular Dynamics Phosphorimager and quantified using Molecular Dynamics ImageQuant software. Percent cleaved was determined by dividing values for cleaved substrate bands by full-length (uncleaved) values plus cleaved values and multiplying by 100 (%cleaved=[C/(U+C)]*100). In vitro cleavage data of enzymatic nucleic acid molecules targeting plus and minus strand HCV RNA is shown in Table VIII.

### Example 5

### Inhibition of Luciferase Activity Using HCV Targeting Enzymatic Nucleic Acids in OST7 Cells

[0216] The capability of enzymatic nucleic acids to inhibit HCV RNA intracellularly was tested using a dual reporter system that utilizes both firefly and Renilla luciferase (FIG. 6). The enzymatic nucleic acids targeted to the 5′ HCV UTR region, which when cleaved, prevents the translation of the transcript into luciferase.

[0217] Synthesis of Stabilized Enzymatic Nucleic Acids

[0218] Enzymatic nucleic acids were designed to target 15 sites within the 5′UTR of the HCV RNA (FIG. 7) and synthesized as previously described, except that all enzymatic nucleic acids contain two 2′-amino uridines. Enzymatic nucleic acid and paired control sequences for targeted sites used in various examples herein are shown in Table VI.

[0219] Reporter Plasmids

[0220] The T7/HCV/firefly luciferase plasmid (HCVT7C₁₋₃₄₁, genotype 1a) was graciously provided by Aleem Siddiqui (University of Colorado Health Sciences Center, Denver, Colo.). The T7/HCV/firefly luciferase plasmid contains a T7 bacteriophage promoter upstream of the HCV 5′UTR (nucleotides 1-341)/firefly luciferase fusion DNA. The Renilla luciferase control plasmid (pRLSV40) was purchased from PROMEGA.

[0221] Luciferase Assay

[0222] Dual luciferase assays were carried out according to the manufacturer's instructions (PROMEGA) at 4 hours after co-transfection of reporter plasmids and enzymatic nucleic acids. All data is shown as the average ratio of HCV/firefly luciferase luminescence over Renilla luciferase luminescence as determined by triplicate samples ±SD.

[0223] Cell Culture and Transfections

[0224] OST7 cells were maintained in Dulbecco's modified Eagle's medium (GIBCO BRL) supplemented with 10% fetal calf serum, L-glutamine (2 mM) and penicillin/streptomycin. For transfections, OST7 cells were seeded in black-walled 96-well plates (Packard) at a density of 12,500 cells/well and incubated at 37° C. under 5% CO₂ for 24 hours. Co-transfection of target reporter HCVT7C (0.8 μg/mL), control reporter pRLSV40, (1.2μg/mL) and enzymatic nucleic acid, (50-200 nM) was achieved by the following method: a 5× mixture of HCVT7C (4 μg/mL), pRLSV40 (6 μg/mL) enzymatic nucleic acid (250-1000 nM) and cationic lipid (28.5 μg/mL) was made in 150 μL of OPTI-MEM (GIBCO BRL) minus serum. Reporter/enzymatic nucleic acid/lipid complexes were allowed to form for 20 min at 37° C. under 5% CO₂. Medium was aspirated from OST7 cells and replaced with 120 μL of OPTI-MEM (GIBCO BRL) minus serum, immediately followed by the addition of 30 μL of 5× reporter/enzymatic nucleic acid/lipid complexes. Cells were incubated with complexes for 4 hours at 37° C. under 5% CO₂.

[0225] IC50 Determinations for Dose Response Curves

[0226] Apparent IC₅₀ values were calculated by linear interpolation. The apparent IC₅₀ is 1/2 the maximal response between the two consecutive points in which approximately 50% inhibition of HCV/luciferase expression is observed on the dose curve.

[0227] Quantitation of RNA Samples

[0228] Total RNA from transfected cells was purified using the Qiagen RNeasy 96 procedure including a DNase I treatment according to the manufacturer's instructions. Real time RT-PCR (Taqman assay) was performed on purified RNA samples using separate primer/probe sets specific for either firefly or Renilla luciferase RNA. Firefly luciferase primers and probe were upper (5′-CGGTCGGTAAAGTTGTTCCATT-3′) (SEQ ID NO. 9690), lower (5′-CCTCTGACACATAATTCGCCTCT-3′) (SEQ ID NO. 9691), and probe (5′-FAM-TGAAGCGAAGGTTGTGGATCTGGATACC-TAMRA-3′) (SEQ ID NO 9692), and Renilla luciferase primers and probe were upper (5′-GTTTATTGAATCGGACCCAGGAT-3′) (SEQ ID NO. 9693), lower (5′-AGGTGCATCTTCTTGCGAAAA-3′) (SEQ ID NO. 9694), and probe (5′-FAM-CTTTTCCAATGCTATTGTTGAAGGTGCCAA-3′) (SEQ ID NO. 9694)-TAMRA, both sets of primers and probes were purchased from Integrated DNA Technologies. RNA levels were determined from a standard curve of amplified RNA purified from a large-scale transfection. RT minus controls established that RNA signals were generated from RNA and not residual plasmid DNA. RT-PCR conditions were: 30 min at 48° C., 10 min at 95° C., followed by 40 cycles of 15 sec at 95° C. and 1 min at 60° C. Reactions were performed on an ABI Prism 7700 sequence detector. Levels of firefly luciferase RNA were normalized to the level of Renilla luciferase RNA present in the same sample. Results are shown as the average of triplicate treatments ±SD.

### Example 6

### Inhibition of HCV 5′UTR-luciferase Expression by Synthetic Stabilized Enzymatic Nucleic Acids

[0229] The primary sequence of the HCV 5′UTR and characteristic secondary structure (FIG. 7) is highly conserved across all HCV genotypes, thus making it a very attractive target for enzymatic nucleic acid-mediated cleavage. Enzymatic hammerhead nucleic acids, as a generally shown in FIG. 8 and Table VI (RPI 12249-12254, 12257-12265) were designed and synthesized to target 15 of the most highly conserved sites in the 5′UTR of HCV RNA. These synthetic enzymatic nucleic acids were stabilized against nuclease degradation by the addition of modifications such as 2′-O-methyl nucleotides, 2′-amino-uridines at U4 and U7 core positions, phosphorothioate linkages, and a 3′-inverted abasic cap.

[0230] In order to mimic cytoplasmic transcription of the HCV genome, OST7 cells were transfected with a target reporter plasmid containing a T7 bacteriophage promoter upstream of a HCV 5′UTR/firefly luciferase fusion gene. Cytoplasmic expression of the target reporter is facilitated by high levels of T7 polymerase expressed in the cytoplasm of OST7 cells. Co-transfection of target reporter HCVT7C₁₋₃₄₁ (firefly luciferase), control reporter pRLSV40 (Renilla luciferase) and enzymatic nucleic acid was carried out in the presence of cationic lipid. To determine the background level of luciferase activity, applicant used a control enzymatic nucleic acid that targets an irrelevant, non-HCV sequence. Transfection of reporter plasmids in the presence of this irrelevant control enzymatic nucleic acid (ICR) resulted in a slight decrease of reporter expression when compared to transfection of reporter plasmids alone. Therefore, the ICR was used to control for non-specific effects on reporter expression during treatment with HCV specific enzymatic nucleic acids. Renilla luciferase expression from the pRLSV40 reporter was used to normalize for transfection efficiency and sample recovery.

[0231] Of the 15 amino-modified hammerhead enzymatic nucleic acids tested, 12 significantly inhibited HCV/luciferase expression (>45%, P<0.05) as compared to the ICR (FIG. 9A). These data suggest that most of the HCV 5′UTR sites targeted here are accessible to enzymatic nucleic acid binding and subsequent RNA cleavage. To investigate further the enzymatic nucleic acid-dependent inhibition of HCV/luciferase activity, hammerhead enzymatic nucleic acids designed to cleave after sites 79, 81, 142, 192, 195, 282 or 330 of the HCV 5′UTR were selected for continued study because their anti-HCV activity was the most efficacious over several experiments. A corresponding attenuated core (AC) control was synthesized for each of the 7 active enzymatic nucleic acids (Table VI). Each paired AC control contains similar nucleotide composition to that of its corresponding active enzymatic nucleic acid however, due to scrambled binding arms and changes to the catalytic core, lacks the ability to bind or catalyze the cleavage of HCV RNA. Treatment of OST7 cells with enzymatic nucleic acids designed to cleave after sites 79, 81, 142, 195 or 330 resulted in significant inhibition of HCV/luciferase expression (65%, 50%, 50%, 80% and 80%, respectively) when compared to HCV/luciferase expression in cells treated with corresponding ACs, P<0.05 (FIG. 9B). It should be noted that treatment with either the ICR or ACs for sites 79, 81, 142 or 192 caused a greater reduction of HCV/luciferase expression than treatment with ACs for sites 195, 282 or 330. The observed differences in HCV/luciferase expression after treatment with ACs most likely represents the range of activity due to non-specific effects of oligonucleotide treatment and/or differences in base composition. Regardless of differences in HCV/luciferase expression levels observed as a result of treatment with ACs, active enzymatic nucleic acids designed to cleave after sites 79, 81, 142, 195, or 330 demonstrated similar and potent anti-HCV activity (FIG. 9B).

### Example 7

### Synthetic Stabilized Enzymatic Nucleic Acids Inhibit HCV/Luciferase Expression in a Concentration-Dependent Manner

[0232] In order to characterize enzymatic nucleic acid efficacy in greater detail, these same 5 lead hammerhead enzymatic nucleic acids were tested for their ability to inhibit HCV/luciferase expression over a range of enzymatic nucleic acid concentrations (0 nM-100 nM). For constant transfection conditions, the total concentration of nucleic acid was maintained at 100 nM for all samples by mixing the active enzymatic nucleic acid with its corresponding AC. Moreover, mixing of active enzymatic nucleic acid and AC maintains the lipid to nucleic acid charge ratio. A concentration-dependent inhibition of HCV/luciferase expression was observed after treatment with each of the 5 enzymatic nucleic acids (FIGS. 10A-E). By linear interpolation, the enzymatic nucleic acid concentration resulting in 50% inhibition (apparent IC₅₀) of HCV/luciferase expression ranged from 40-215 nM. The two most efficacious enzymatic nucleic acids were those designed to cleave after sites 195 or 330 with apparent IC₅₀ values of 46 nM and 40 nM, respectively (FIGS. 10D and E).

### Example 8

### An Enzymatic Nucleic Acid Mechanism is Required for the Observed Inhibition of HCV/Luciferase Expression

[0233] To confirm that an enzymatic nucleic acid mechanism of action was responsible for the observed inhibition of HCV/luciferase expression, paired binding-arm attenuated core (BAC) controls (RPI 15291 and 15294) were synthesized for direct comparison to enzymatic nucleic acids targeting sites 195 (RPI 12252) and 330 (RPI 12254). Paired BACs can specifically bind HCV RNA but are unable to promote RNA cleavage because of changes in the catalytic core and, thus, can be used to assess inhibition due to binding alone. Also included in this comparison were paired SAC controls (RPI 15292 and 15295) that contain scrambled binding arms and attenuated catalytic cores, and so lack the ability to bind the target RNA or to catalyze target RNA cleavage.

[0234] Enzymatic nucleic acid cleavage of target RNA should result in both a lower level of HCV/luciferase RNA and a subsequent decrease in HCV/luciferase expression. In order to analyze target RNA levels, a reverse transcriptase/polymerase chain reaction (RT-PCR) assay was employed to quantify HCV/luciferase RNA levels. Primers were designed to amplify the luciferase coding region of the HCV 5′UTR/luciferase RNA. This region was chosen because HCV-targeted enzymatic nucleic acids that might co-purify with cellular RNA would not interfere with RT-PCR amplification of the luciferase RNA region. Primers were also designed to amplify the Renilla luciferase RNA so that Renilla RNA levels could be used to control for transfection efficiency and sample recovery.

[0235] OST7 cells were treated with active enzymatic nucleic acids designed to cleave after sites 195 or 330, paired SACs, or paired BACs. Treatment with enzymatic nucleic acids targeting site 195 or 330 resulted in a significant reduction of HCV/luciferase RNA when compared to their paired SAC controls (P<0.01). In this experiment the site 195 enzymatic nucleic acid was more efficacious than the site 330 enzymatic nucleic acid (FIG. 11A). Treatment with paired BACs that target site 195 or 330 did not reduce HCV/luciferase RNA when compared to the corresponding SACs, thus confirming that the ability to bind alone does not result in a reduction of HCV/luciferase RNA.

[0236] To confirm that enzymatic nucleic acid-mediated cleavage of target RNA is necessary for inhibition of HCV/luciferase expression, HCV/luciferase activity was determined in the same experiment. As expected, significant inhibition of HCV/luciferase expression was observed after treatment with active enzymatic nucleic acids when compared to paired SACs (FIG. 11B). Importantly, treatment with paired BACs did not inhibit HCV/luciferase expression, thus confirming that the ability to bind alone is also not sufficient to inhibit translation. As observed in the RNA assay, the site 195 enzymatic nucleic acid was more efficacious than the site 330 enzymatic nucleic acid in this experiment. However, a correlation between enzymatic nucleic acid-mediated HCV RNA reduction and inhibition of HCV/luciferase translation was observed for enzymatic nucleic acids to both sites. The reduction in target RNA and the necessity for an active enzymatic nucleic acid catalytic core confirm that a enzymatic nucleic acid mechanism is required for the observed reduction in HCV/luciferase protein activity in cells treated with site 195 or site 330 enzymatic nucleic acids.

### Example 9

### Zinzyme Inhibition of Chimeric HCV/Poliovirus Replication

[0237] During HCV infection, viral RNA is present as a potential target for enzymatic nucleic acid cleavage at several processes: un-coating, translation, RNA replication and packaging. Target RNA can be more or less accessible to enzymatic nucleic acid cleavage at any one of these steps. Although the association between the HCV initial ribosome entry site (IRES) and the translation apparatus is mimicked in the HCV 5′UTR/luciferase reporter system, these other viral processes are not represented in the OST7 system. The resulting RNA/protein complexes associated with the target viral RNA are also absent. Moreover, these processes can be coupled in an HCV-infected cell which could further impact target RNA accessibility. Therefore, applicant tested whether enzymatic nucleic acids designed to cleave the HCV 5′UTR could effect a replicating viral system.

[0238] Recently, Lu and Wimmer characterized a HCV-poliovirus chimera in which the poliovirus IRES was replaced by the IRES from HCV (Lu & Wimmer, 1996, Proc. Natl. Acad. Sci. USA. 93, 1412-1417). Poliovirus (PV) is a positive strand RNA virus like HCV, but unlike HCV is non-enveloped and replicates efficiently in cell culture. The HCV-PV chimera expresses a stable, small plaque phenotype relative to wild type PV.

[0239] The following enzymatic nucleic acid molecules (zinzymes) were synthesized and tested for replicative inhibition of an HCV/Poliovirus chimera: RPI 18763, RPI 18812, RPI 18749, RPI 18765, RPI 18792, and RPI 18814 (Table V). A scrambled attenuated core enzymatic nucleic acid, RPI 18743, was used as a control.

[0240] HeLa cells were infected with the HCV-PV chimera for 30 minutes and immediately treated with enzymatic nucleic acid. HeLa cells were seeded in U-bottom 96-well plates at a density of 9000-10,000 cells/well and incubated at 37° C. under 5% CO2 for 24 h. Transfection of nucleic acid (200 nM) was achieved by mixing of 10× nucleic acid (2000 nM) and 10× of a cationic lipid (80 μg/ml) in DMEM (Gibco BRL) with 5% fetal bovine serum (FBS). Nucleic acid/lipid complexes were allowed to incubate for 15 minutes at 37° C. under 5% CO2. Medium was aspirated from cells and replaced with 80 μl of DMEM (Gibco BRL) with 5% FBS serum, followed by the addition of 20 μls of 10× complexes. Cells were incubated with complexes for 24 hours at 37° C. under 5% CO2.

[0241] The yield of HCV-PV from treated cells was quantified by plaque assay. The plaque assays were performed by diluting virus samples in serum-free DMEM (Gibco BRL) and applying 100 μl to HeLa cell monolayers (˜80% confluent) in 6-well plates for 30 minutes. Infected monolayers were overlayed with 3 ml 1.2% agar (Sigma) and incubated at 37° C. under 5% CO2. Two or three days later the overlay was removed, monolayers were stained with 1.2% crystal violet, and plaque forming units were counted. The results for the zinzyme inhibition of HCV-PV replication are shown in FIG. 16.

### Example 10

### Antisense Inhibition of Chimeric HCV/Poliovirus Replication

[0242] Antisense nucleic acid molecules (RPI 17501 and RPI 17498, Table VII) were tested for replicative inhibition of an HCV/Poliovirus chimera compared to scrambled controls. An antisense nucleic acid molecule is a non-enzymatic nucleic acid molecule that binds to target RNA by means of RNA-RNA or RNA-DNA or RNA-PNA (protein nucleic acid; Egholm et al., 1993 Nature 365, 566) interactions and alters the activity of the target RNA (for a review, see Stein and Cheng, 1993 Science 261, 1004 and Woolf et al., U.S. Pat. No. 5,849,902). Typically, antisense molecules are complementary to a target sequence along a single contiguous sequence of the antisense molecule. However, in certain embodiments, an antisense molecule can bind to substrate such that the substrate molecule forms a loop, and/or an antisense molecule can bind such that the antisense molecule forms a loop. Thus, the antisense molecule can be complementary to two (or even more) non-contiguous substrate sequences or two (or even more) non-contiguous sequence portions of an antisense molecule can be complementary to a target sequence or both. For a review of current antisense strategies, see Schmajuk et al., 1999, J. Biol. Chem., 274, 21783-21789, Delihas et al., 1997, Nature, 15, 751-753, Stein et al., 1997, Antisense N. A. Drug Dev., 7, 151, Crooke, 2000, Methods Enzymol., 313, 3-45; Crooke, 1998, Biotech. Genet. Eng. Rev., 15, 121-157, Crooke, 1997, Ad. Pharmacol., 40, 1-49. In addition, antisense DNA can be used to target RNA by means of DNA-RNA interactions, thereby activating RNase H, which digests the target RNA in the duplex. The antisense oligonucleotides can comprise one or more RNAse H activating region, which is capable of activating RNAse H cleavage of a target RNA. Antisense DNA can be synthesized chemically or expressed via the use of a single stranded DNA expression vector or equivalent thereof. Additionally, antisense molecules can be used in combination with the enzymatic nucleic acid molecules of the instant invention.

[0243] A “RNase H activating region” is a region (generally greater than or equal to 4-25 nucleotides in length, preferably from 5-11 nucleotides in length) of a nucleic acid molecule capable of binding to a target RNA to form a non-covalent complex that is recognized by cellular RNase H enzyme (see for example Arrow et al., U.S. Pat. No. 5,849,902; Arrow et al., U.S. Pat. No. 5,989,912). The RNase H enzyme binds to the nucleic acid molecule-target RNA complex and cleaves the target RNA sequence. The RNase H activating region comprises, for example, phosphodiester, phosphorothioate (preferably at least four of the nucleotides are phosphorothiote substitutions; more specifically, 4-11 of the nucleotides are phosphorothiote substitutions); phosphorodithioate, 5′-thiophosphate, or methylphosphonate backbone chemistry or a combination thereof. In addition to one or more backbone chemistries described above, the RNase H activating region can also comprise a variety of sugar chemistries. For example, the RNase H activating region can comprise deoxyribose, arabino, fluoroarabino or a combination thereof, nucleotide sugar chemistry. Those skilled in the art will recognize that the foregoing are non-limiting examples and that any combination of phosphate, sugar and base chemistry of a nucleic acid that supports the activity of RNase H enzyme is within the scope of the definition of the RNase H activating region and the instant invention.

[0244] HeLa cells were infected with the HCV-PV chimera for 30 minutes and immediately treated with antisense nucleic acid. HeLa cells were seeded in U-bottom 96-well plates at a density of 9000-10,000 cells/well and incubated at 37° C. under 5% CO2 for 24 h. Transfection of nucleic acid (200 nM) was achieved by mixing of 10× nucleic acid (2000 nM) and 10× of a cationic lipid (80 μg/ml) in DMEM (Gibco BRL) with 5% fetal bovine serum (FBS). Nucleic acid/lipid complexes were allowed to incubate for 15 minutes at 37° C. under 5% CO2. Medium was aspirated from cells and replaced with 80 μl of DMEM (Gibco BRL) with 5% FBS serum, followed by the addition of 20 μls of 10× complexes. Cells were incubated with complexes for 24 hours at 37° C. under 5% CO2.

[0245] The yield of HCV-PV from treated cells was quantified by plaque assay. The plaque assays were performed by diluting virus samples in serum-free DMEM (Gibco BRL) and applying 100 μl to HeLa cell monolayers (˜80% confluent) in 6-well plates for 30 minutes. Infected monolayers were overlayed with 3 ml 1.2% agar (Sigma) and incubated at 37° C. under 5% CO2. Two or three days later the overlay was removed, monolayers were stained with 1.2% crystal violet, and plaque forming units were counted. The results for the antisense inhibition of HCV-PV are shown in FIG. 17.

### Example 11

### Nucleic Acid Inhibition of Chimeric HCV/PV in Combination with Interferon

[0246] One of the limiting factors in interferon (IFN) therapy for chronic HCV are the toxic side effects associated with IFN. Applicant has reasoned that lowering the dose of IFN needed can reduce these side effects. Applicant has previously shown that enzymatic nucleic acid molecules targeting HCV RNA have a potent antiviral effect against replication of an HCV-poliovirus (PV) chimera (Macejak et al., 2000, Hepatology, 31, 769-776). In order to determine if the antiviral effect of type 1 IFN could be improved by the addition of anti-HCV enzymatic nucleic acid treatment, a dose response (0 U/ml to 100 U/ml) with IFN alfa 2a or IFN alfa 2b was performed in HeLa cells in combination with 200 nM site 195 anti-HCV enzymatic nucleic acid (RPI 13919) or enzymatic nucleic acid control (SAC) treatment. The SAC control (RPI 17894) is a scrambled binding arm, attenuated core version of the site 195 enzymatic nucleic acid (RPI 13919). IFN dose responses were performed with different pretreatment regimes to find the dynamic range of inhibition in this system. In these studies, HeLa cells were used instead of HepG2 because of more efficient enzymatic nucleic acid delivery (Macejak et al., 2000, Hepatology, 31, 769-776).

[0247] Cells and Virus

[0248] HeLa cells were maintained in DMEM (BioWhittaker, Walkersville, Md.) supplemented with 5% fetal bovine serum. A cloned DNA copy of the HCV-PV chimeric virus was a gift of Dr. Eckard Wimmer (NYU, Stony Brook, N.Y.). An RNA version was generated by in vitro transcription and transfected into HeLa cells to produce infectious virus (Lu and Wimmer, 1996, PNAS USA., 93, 1412-1417).

[0249] Enzymatic Nucleic Acid Synthesis

[0250] Nuclease resistant enzymatic nucleic acids and control oligonucleotides containing 2′-O-methyl-nucleotides, 2′-deoxy-2′-C-allyl uridine, a 3′-inverted abasic cap, and phosphorothioate linkages were chemically synthesized. The anti-HCV enzymatic nucleic acid (RPI 13919) targeting cleavage after nucleotide 195 of the 5′ UTR of HCV is shown in Table V. Attenuated core controls have nucleotide changes in the core sequence that greatly diminished the enzymatic nucleic acid's cleavage activity. The attenuated controls either contain scrambled binding arms (referred to as SAC, RPI 18743) or maintain binding arms (BAC, RPI 17894) capable of binding to the HCV RNA target.

[0251] Enzymatic Nucleic Acid Delivery

[0252] A cationic lipid was used as a cytofectin agent. HeLa cells were seeded in 96-well plates at a density of 9000-10,000 cells/well and incubated at 37° C. under 5% CO2 for 24 h. Transfection of enzymatic nucleic acid or control oligonucleotides (200 nM) was achieved by mixing 10× enzymatic nucleic acid or control oligonucleotides (2000 nM) with 10× RPI.9778 (80 μg/ml) in DMEM containing 5% fetal bovine serum (FBS) in U-bottom 96-well plates to make 5× complexes. Enzymatic nucleic acid/lipid complexes were allowed to incubate for 15 min at 37° C. under 5% CO2. Medium was aspirated from cells and replaced with 80 μl of DMEM (Gibco BRL) containing 5% FBS serum, followed by the addition of 20 μl of 5× complexes. Cells were incubated with complexes for 24 h at 37° C. under 5% CO2.

[0253] Interferon/Enzymatic Nucleic Acid Combination Treatment

[0254] Interferon alfa 2a (Roferon®) was purchased from Roche Bioscience (Palo Alto, Calif.). Interferon alfa 2b (Intron A®) was purchased from Schering-Plough Corporation (Madison, N.J.). Consensus interferon (interferon-alfa-con 1) was a generous gift of Amgen, Inc. (Thousand Oaks, Calif.). For the basis of comparison, the manufacturers' specified units were used in the studies reported here; however, the manufacturers' unit definitions of these three IFN preparations are not necessarily the same. Nevertheless, since clinical dosing is based on the manufacturers' specified units, a direct comparison based on these units has relevance to clinical therapeutic indices. HeLa cells were seeded (10,000 cells per well) and incubated at 37° C. under 5% CO2 for 24 h. Cells were then pre-treated with interferon in complete media (DMEM+5% FBS) for 4 h and then infected with HCV-PV at a multiplicity of infection (MOI)=0.1 for 30 min. The viral inoculum was then removed and enzymatic nucleic acid or attenuated control (SAC or BAC) was delivered with the cytofectin formulation (8 μg/ml) in complete media for 24 h as described above. Where indicated for enzymatic nucleic acid dose response studies, active enzymatic nucleic acid was mixed with SAC to maintain a 200 nM total oligonucleotide concentration and the same lipid charge ratio. After 24 h, cells were lysed to release virus by three cycles of freeze/thaw. Virus was quantified by plaque assay and viral yield is reported as mean plaque forming units per ml (pfu/ml)+SD. All experiments were repeated at least twice and the trends in the results reported were reproducible. Significance levels (P values) were determined by the Student's test.

[0255] Plaque Assay

[0256] Virus samples were diluted in serum-free DMEM and 100 μl applied to Vero cell monolayers (˜80% confluent) in 6-well plates for 30 min. Infected monolayers were overlaid with 3 ml 1.2% agar (Sigma Chemical Company, St. Louis, Mo.) and incubated at 37° C. under 5% CO2. When plaques were visible (after two to three days) the overlay was removed, monolayers were stained with 1.2% crystal violet, and plaque forming units were counted.

[0257] Results

[0258] As shown in FIGS. 12A and 12B, treatment with the site 195 (RPI 13919) anti-HCV hammerhead enzymatic nucleic acid alone (0 U/ml IFN) resulted in viral replication that was dramatically reduced compared to SAC-treated cells (85%, P<0.01). For both IFN alfa 2a (FIG. 12A) or IFN alfa 2b (FIG. 12B), treatment with 25 U/ml resulted in a ˜90% inhibition of HCV-PV replication in SAC-treated cells as compared to cells treated with SAC alone (p<0.0l for both observations). The maximal level of inhibition in SAC-treated cells (94%) was achieved by treatment with ≧50U/ml of either IFN alfa 2a or IFN alfa 2b (p<0.01 for both observations versus SAC alone). Maximal inhibition could however, be achieved by a 5-fold lower dose of IFN alfa 2a (10 U/ml) if enzymatic nucleic acid targeting site 195 in the 5′ UTR of HCV RNA was given in combination (FIG. 12A, p<0.01). While the additional effect of enzymatic nucleic acid treatment on IFN alfa 2b-treated cells at 10 U/ml was very slight, the combined effect with 25 U/ml IFN alfa 2b was greater in magnitude (FIG. 12B). For both interferons tested, pretreatment with 25 U/ml in combination with 200 nM site 195 anti-HCV enzymatic nucleic acid resulted in an even greater level of inhibition of viral replication (>98%) compared to replication in cells treated with 200 nM SAC alone (P<0.01).

[0259] A dose response of the site 195 anti-HCV enzymatic nucleic acid was also performed in HeLa cells, either with or without 12.5 U/ml IFN alfa 2a or IFN alfa 2b pretreatment. As shown in FIG. 13, enzymatic nucleic acid-mediated inhibition was dose-dependent and a significant inhibition of HCV-PV replication (>75% versus 0 nM enzymatic nucleic acid, P<0.01) could be achieved by treatment with ≧150 nM anti-HCV enzymatic nucleic acid alone (no IFN). However, in IFN-pretreated cells, the dose of anti-HCV enzymatic nucleic acid needed to achieve this level of inhibition was decreased 3-fold to 50 nM (P<0.01 versus 0 nM enzymatic nucleic acid). In comparison, treatment with the site 195 anti-HCV enzymatic nucleic acid alone at 50 nM resulted in only ˜40% inhibition of virus replication. Pretreatment with IFN enhanced the antiviral effect of site 195 enzymatic nucleic acid at all enzymatic nucleic acid doses, compared to no IFN pretreatment.

[0260] Interferon-alfacon1, consensus IFN (CIFN), is another type 1 IFN that is used to treat chronic HCV. To determine if a similar enhancement can occur in CIFN-treated cells, a dose response with CIFN was performed in HeLa cells using 0 U/ml to 12.5 U/ml CIFN in combination with 200 nM site 195 anti-HCV enzymatic nucleic acid or SAC treatment (FIG. 14A). Again, in the presence of the site 195 anti-HCV enzymatic nucleic acid alone, viral replication was dramatically reduced compared to SAC-treated cells. As shown in FIG. 14A, treatment with 200 nM anti-HCV enzymatic nucleic acid alone significantly inhibited HCV-PV replication (90% versus SAC treatment, P<0.01). However, pretreatment with concentrations of CIFN from 1 U/ml to 12.5 U/ml in combination with 200 nM anti-HCV enzymatic nucleic acid resulted in even greater inhibition of viral replication (>98%) compared to replication in cells treated with 200 nM SAC alone (P<0.01). It is important to note that pretreatment with 1 U/ml CIFN in SAC-treated cells did not have a significant effect on HCV-poliovirus replication, but in the presence of enzymatic nucleic acid a significant inhibition of replication was observed (>98%, P<0.01). Thus, the dose of CIFN needed to achieve a >98% inhibition could be lowered to 1 U/ml in cells also treated with 200 nM site 195 anti-HCV enzymatic nucleic acid.

[0261] A dose response of site 195 anti-HCV enzymatic nucleic acid was then performed in HeLa cells, either with or without 12.5 U/ml CIFN pretreatment. As shown in FIG. 14B, a significant inhibition of HCV-PV replication (>95% versus 0 nM enzymatic nucleic acid, P<0.01) could be achieved by treatment with ≧150 nM anti-HCV enzymatic nucleic acid alone. However, in CIFN-pretreated cells, the dose of anti-HCV enzymatic nucleic acid needed to achieve this level of inhibition was only 50 nM (P<0.01). In comparison, treatment with the site 195 anti-HCV enzymatic nucleic acid alone at 50 nM resulted in ˜50% inhibition of virus replication. Thus, as was seen with IFN alfa 2a and IFN alfa 2b, the dose of enzymatic nucleic acid could be reduced 3-fold in the presence of CIFN pretreatment to achieve a similar antiviral effect as enzymatic nucleic acid-treatment alone.

[0262] To further explore the combination of lower enzymatic nucleic acid concentration and CIFN, a dose response with 0 U/ml to 12.5 U/ml CIFN was subsequently performed in HeLa cells in combination with 50 nM site 195 anti-HCV enzymatic nucleic acid treatment. In multiple experiments, treatment with 50 nM anti-HCV enzymatic nucleic acid alone inhibited HCV-PV replication 50%-81% compared to viral replication in SAC-treated cells. As for the experiment shown in FIG. 14A, treatment with CIFN alone at 5 U/ml resulted in ˜50% inhibition of viral replication. However, a four hour pretreatment with 5 U/ml CIFN followed by 50 nM anti-HCV enzymatic nucleic acid treatment resulted in 95%-97% inhibition compared to SAC-treated cells (P<0.01).

[0263] To demonstrate that the enhanced antiviral effect of CIFN and enzymatic nucleic acid combination treatment was dependent upon enzymatic nucleic acid cleavage activity, the effect of CIFN in combination with site 195 anti-HCV enzymatic nucleic acid versus the effect of CIFN in combination with a binding competent, attenuated core, control (BAC) was then compared. The BAC can still bind to its specific RNA target, but is greatly diminished in cleavage activity. Pretreatment with 12.5 U/ml CIFN reduced the viral yield ˜90% (7-fold) in cells treated with BAC (compare CIFN versus BAC in FIG. 15). Cells treated with 200 nM site 195 anti-HCV enzymatic nucleic acid alone produced 95% (17-fold) less virus than BAC-treated cells (195 RZ BAC in FIG. 15). The combination of CIFN pretreatment and 200 nM site 195 anti-HCV enzymatic nucleic acid results in an augmented >98% (300-fold) reduction in viral yield (CIFN+RZ versus control in FIG. 15).

[0264] 2′-5′-Oligoadenylate Inhibition of HCV

[0265] Type 1 Interferon is a key constituent of many effective treatment programs for chronic HCV infection. Treatment with type 1 interferon induces a number of genes and results in an antiviral state within the cell. One of the genes induced is 2′, 5′ oligoadenylate synthetase, an enzyme that synthesizes short 2′, 5′ oligoadenylate (2-5A) molecules. Nascent 2-5A subsequently activates a latent RNase, RNase L, which in turn nonspecifically degrades viral RNA. As described herein, ribozymes targeting HCV RNA that inhibit the replication of an HCV-poliovirus (HCV-PV) chimera in cell culture and have shown that this antiviral effect is augmented if ribozyme is given in combination with type 1 interferon. In addtion, the 2-5A component of the interferon response can also inhibit replication of the HCV-PV chimera.

[0266] The antiviral effect of anti-HCV ribozyme treatment is enhanced if type 1 interferon is given in combination. Interferon induces a number of gene products including 2′,5′ oligoadenylate (2-5A) synthetase, double-stranded RNA-activated protein kinase (PKR), and the Mx proteins. Mx proteins appear to interfere with nuclear transport of viral complexes and are not thought to play an inhibitory role in HCV infection. On the other hand, the additional 2-5A-mediated RNA degradation (via RNase L) and/or the inhibition of viral translation by PKR in interferon-treated cells can augment the ribozyme-mediated inhibition of HCV-PV replication.

[0267] To investigate the potential role of the 2-5A/RNase L pathway in this enhancement phenomenon, HCV-PV replication was analyzed in HeLa cells treated exogenously with chemically-synthesized analogs of 2-5A (FIG. 18), alone and in combination with the anti-HCV ribozyme (RPI 13919). These results were compared to replication in cells treated with interferon and/or anti-HCV ribozyme. Anti-HCV ribozyme was transfected into cells with a cationic lipid. To control for nonspecific effects due to lipid-mediated transfection, a scrambled arm, attenuated core, oligonucleotide (SAC) (RPI 17894) was transfected for comparison. The SAC is the same base composition as the ribozyme but is greatly attenuated in catalytic activity due to changes in the core sequence and cannot bind specifically to the HCV sequence.

[0268] As shown in FIG. 19A, HeLa cells pretreated with 10 U/ml consensus interferon for 4 hours prior to HCV-PV infection resulted in ˜70% reduction of viral replication in SAC-treated cells. Similarly, HeLa cells treated with 100 nM anti-HCV ribozyme for 20 hours after infection resulted in an ˜80% reduction in viral yield. This antiviral effect was enhanced to ˜98% inhibition in HeLa cells pretreated with interferon for 4 hours before infection and then treated with anti-HCV ribozyme for 20 hours after infection. In parallel, a 2-5A compound (analog I, FIG. 18) that was protected from nuclease digestion at the 3′-end with an inverted abasic moiety was tested. As shown in FIG. 19B, treatment with 200 nM 2-5A analog I for 4 hours prior to HCV-PV infection only slightly inhibited HCV-PV replication (˜20%) in SAC-treated cells. Moreover, the inhibition due to a 20 hour anti-HCV ribozyme treatment was not augmented with a 4 hour pretreatment of 2-5A in combination (compare third bar to fourth bar in FIG. 19B).

[0269] There are several possible possible explanations why the chemically synthesized 2-5A analog was not able to completely activate RNase L. It is possible that the 2-5A analog was not sufficiently stable or that in this experiment the 4 hour pretreatment period was too short for RNase L activation. To test these possibilities, a 2-5A compound containing a 5′-terminal thiophosphate (P═S) for added nuclease resistance, in addition to the 3′-abasic, was also included (analog II, FIG. 18). In addition, a longer 2-5A treatment was used. In this experiment (FIG. 20), HeLa cells were treated with 2-5A or 2-5A(P═S) for 20 hours after HCV-PV infection. Again, anti-HCV ribozyme treatment resulted in >80% inhibition. In contrast to the 20% inhibition of viral replication seen with a 4 hour 2-5A pretreatment, viral replication in cells treated with 2-5A analog I for 20 hours after HCV-PV infection was inhibited by ˜70%. The P═S version (analog II) inhibited HCV-PV replication by 35%. Thus, both 2-5A analogs used here are able to generate an antiviral effect, presumably through RNase L activation. The P═S version, although more resistant to 5′ dephosphorylation, did not yield as great an anti-viral effect. It is possible that combination of the 5′-terminal thiophosphate together with the presence of a 3′-inverted abasic moiety can interfere with RNase L activation. Nevertheless, these results demonstrate potent anti-HCV activity by a nuclease-stabilized 2-5A analog.

[0270] The level of reduction in HCV-PV replication in cells treated with 2-5A analog I for 20 hours was similar to that in cells pretreated with consensus interferon for 4 hours. To determine if this expanded 2-5A treatment regimen would enhance anti-HCV ribozyme efficacy to the same degree as does the interferon pretreatment, HeLa cells infected with HCV-PV were treated with a combination of 2-5A and anti-HCV ribozyme for 20 hours after infection. In this experiment, a 200 nM treatment with anti-HCV ribozyme or 2-5A treatment alone inhibited viral replication by 88% or ˜60%, respectively, compared to SAC treatment (FIG. 21, left three bars). To maintain consistent transfection conditions but vary the concentration of anti-HCV ribozyme or 2-5A, anti-HCV ribozyme was mixed with the SAC to maintain a total dose of 200 nM. A 50 nM treatment with anti-HCV ribozyme inhibited HCV-PV replication by ˜70% (solid middle bar). However, the amount of HCV-PV replication was not further reduced in cells treated with a combination of 50 nM anti-HCV ribozyme and 150 nM 2-5A (striped middle bar). Likewise, cells treated with 100 nM anti-HCV ribozyme inhibited HCV-PV replication by ˜80% whether they were also treated with 100 nM of 2-5A or SAC (right two bars). In contrast, antiviral activity increased from 80% to 98% when 100 nM anti-HCV ribozyme was given in combination with interferon (FIG. 19A). The reasons for the lack of additive or synergistic effects for the ribozyme/2-5A combination therapy is unclear at this time but can be due to that fact that both compounds have a similar mechanism of action (degradation of RNA). Further study is warranted to examine this possibility.

[0271] As a monotherapy, 2-5A treatment generates a similar inhibitory effect on HCV-poliovirus replication as does interferon treatment. If these results are maintained in HCV patients, treatment with 2-5A can not only be efficacious but can also generate less side effects than those observed with interferon if the plethora of interferon-induced genes were not activated.

[0272] Cell Culture Assays Although there have been reports of replication of HCV in cell culture (see below), these systems are difficult to replicate and have proven unreliable. Therefore, as was the case for development of other anti-HCV therapeutics such as interferon and ribavirin, after demonstration of safety in animal studies applicant can proceed directly into a clinical feasibility study.

[0273] Several recent reports have documented in vitro growth of HCV in human cell lines (Mizutani et al., Biochem Biophys Res Commun 1996 227(3):822-826; Tagawa et al., Journal of Gasteroenterology and Hepatology 1995 10(5):523-527; Cribier et al., Journal of General Virology 76(10):2485-2491; Seipp et al., Journal of General Virology 1997 78(10)2467-2478; Iacovacci et al., Research Virology 1997 148(2):147-151; Iocavacci et al., Hepatology 1997 26(5) 1328-1337; Ito et al., Journal of General Virology 1996 77(5):1043-1054; Nakajima et al., Journal of Virology 1996 70(5):3325-3329; Mizutani et al., Journal of Virology 1996 70(10):7219-7223; Valli et al., Res Virol 1995 146(4): 285-288; Kato et al., Biochem Biophys Res Comm 1995 206(3):863-869). Replication of HCV has been demonstrated in both T and B cell lines as well as cell lines derived from human hepatocytes. Demonstration of replication was documented using either RT-PCR based assays or the b-DNA assay. It is important to note that the most recent publications regarding HCV cell cultures document replication for up to 6-months.

[0274] Additionally, another recent study has identified more robust strains of hepatitis C virus having adaptive mutations that allow the strains to replicate more vigorously in human cell culture, Blight et al., Science, 290: 1972-1974 (2000). The mutations that confer this enhanced ability to replicate are located in a specific region of a protein identified as NS5A. These studies showed that in certain cell culture systems, infection with the robust strains produces a 10,000-fold increase in the number of infected cells. The greatly increased availability of HCV-infected cells in culture can be used to develop high-throughput screening assays, in which a large number of compounds, such as enzymatic nucleic acid molecules, can be tested to determine their effectiveness.

[0275] In addition to cell lines that can be infected with HCV, several groups have reported the successful transformation of cell lines with cDNA clones of full-length or partial HCV genomes (Harada et al., Journal of General Virology 1995 76(5)1215-1221; Haramatsu et al., Journal of Viral Hepatitis 1997 4S(1):61-67; Dash et al., American Journal of Pathology 1997 151(2):363-373; Mizuno et al., Gasteroenterology 1995 109(6):1933-40; Yoo et al., Journal Of Virology 1995 69(1):32-38).

[0276] Animal Models

[0277] The best characterized animal system for HCV infection is the chimpanzee. Moreover, the chronic hepatitis that results from HCV infection in chimpanzees and humans is very similar. Although clinically relevant, the chimpanzee model suffers from several practical impediments that make use of this model difficult. These include; high cost, long incubation requirements and lack of sufficient quantities of animals. Due to these factors, a number of groups have attempted to develop rodent models of chronic hepatitis C infection. While direct infection has not been possible several groups have reported on the stable transfection of either portions or entire HCV genomes into rodents (Yamamoto et al., Hepatology 1995 22(3): 847-855; Galun et al., Journal of Infectious Disease 1995 172(1):25-30; Koike et al., Journal of general Virology 1995 76(12)3031-3038; Pasquinelli et al., Hepatology 1997 25(3): 719-727; Hayashi et al, Princess Takamatsu Symp 1995 25:1430149; Mariya K, Yotsuyanagi H, Shintani Y, Fujie H, Ishibashi K, Matsuura Y, Miyamura T, Koike K. Hepatitis C virus core protein induces hepatic steatosis in transgenic mice. Journal of General Virology 1997 78(7) 1527-1531; Takehara et al., Hepatology 1995 21(3):746-751; Kawamura et al., Hepatology 1997 25(4): 1014-1021). In addition, transplantation of HCV infected human liver into immunocompromised mice results in prolonged detection of HCV RNA in the animal's blood.

[0278] Vierling, International PCT Publication No. WO 99/16307, describes a method for expressing hepatitis C virus in an in vivo animal model. Viable, HCV infected human hepatocytes are transplanted into a liver parenchyma of a scid/scid mouse host. The scid/scid mouse host is then maintained in a viable state, whereby viable, morphologically intact human hepatocytes persist in the donor tissue and hepatitis C virus is replicated in the persisting human hepatocytes. This model provides an effective means for the study of HCV inhibition by enzymatic nucleic acids in vivo.

[0279] Diagnostic Uses

[0280] Enzymatic nucleic acids of this invention can be used as diagnostic tools to examine genetic drift and mutations within diseased cells or to detect the presence of HCV RNA in a cell. The close relationship between enzymatic nucleic acid activity and the structure of the target RNA allows the detection of mutations in any region of the molecule, which alters the base-pairing and three-dimensional structure of the target RNA. By using multiple enzymatic nucleic acids described in this invention, one can map nucleotide changes, which are important to RNA structure and function in vitro, as well as in cells and tissues. Cleavage of target RNAs with enzymatic nucleic acids can be used to inhibit gene expression and define the role (essentially) of specified gene products in the progression of disease. In this manner, other genetic targets can be defined as important mediators of the disease. These experiments will lead to better treatment of the disease progression by affording the possibility of combination therapies (e.g., multiple enzymatic nucleic acids targeted to different genes, enzymatic nucleic acids coupled with known small molecule inhibitors, or intermittent treatment with combinations of enzymatic nucleic acids and/or other chemical or biological molecules). Other in vitro uses of enzymatic nucleic acids of this invention are well known in the art, and include detection of the presence of mRNAs associated with HCV related condition. Such RNA is detected by determining the presence of a cleavage product after treatment with a enzymatic nucleic acid using standard methodology.

[0281] In a specific example, enzymatic nucleic acids which cleave only wild-type or mutant forms of the target RNA are used for the assay. The first enzymatic nucleic acid is used to identify wild-type RNA present in the sample and the second enzymatic nucleic acid is used to identify mutant RNA in the sample. As reaction controls, synthetic substrates of both wild-type and mutant RNA are cleaved by both enzymatic nucleic acids to demonstrate the relative enzymatic nucleic acid efficiencies in the reactions and the absence of cleavage of the “non-targeted” RNA species. The cleavage products from the synthetic substrates also serve to generate size markers for the analysis of wild-type and mutant RNAs in the sample population. Thus each analysis requires two enzymatic nucleic acids, two substrates and one unknown sample which are combined into six reactions. The presence of cleavage products is determined using an RNase protection assay so that full-length and cleavage fragments of each RNA can be analyzed in one lane of a polyacrylamide gel. It is not absolutely required to quantify the results to gain insight into the expression of mutant RNAs and putative risk of the desired phenotypic changes in target cells. The expression of mRNA whose protein product is implicated in the development of the phenotype (i.e., HCV) is adequate to establish risk. If probes of comparable specific activity are used for both transcripts, then a qualitative comparison of RNA levels is adequate and will decrease the cost of the initial diagnosis. Higher mutant form to wild-type ratios are correlated with higher risk whether RNA levels are compared qualitatively or quantitatively.

[0282] Additional Uses

[0283] Potential usefulness of sequence-specific enzymatic nucleic acid molecules of the instant invention have many of the same applications for the study of RNA that DNA restriction endonucleases have for the study of DNA (Nathans et al., 1975 Ann. Rev. Biochem. 44:273). For example, the pattern of restriction fragments can be used to establish sequence relationships between two related RNAs, and large RNAs can be specifically cleaved to fragments of a size more useful for study. The ability to engineer sequence specificity of the enzymatic nucleic acid molecule is ideal for cleavage of RNAs of unknown sequence. Applicant describes the use of nucleic acid molecules to down-regulate gene expression of target genes in bacterial, microbial, fungal, viral, and eukaryotic systems including plant, or mammalian cells.

### TABLE 1

[0284] Characteristics of Naturally Occurring Ribozymes

[0285] Group I Introns

[0286] Size: ˜150 to >1000 nucleotides.

[0287] Requires a U in the target sequence immediately 5′ of the cleavage site.

[0288] Binds 4-6 nucleotides at the 5′-side of the cleavage site.

[0289] Reaction mechanism: attack by the 3′-OH of guanosine to generate cleavage products with 3′-OH and 5′-guanosine.

[0290] Additional protein cofactors required in some cases to help folding and maintenance of the active structure. [1]

[0291] Over 300 known members of this class. Found as an intervening sequence in Tetrahymena thermophila rRNA, fungal mitochondria, chloroplasts, phage T4, blue-green algae, and others.

[0292] Major structural features largely established through phylogenetic comparisons, mutagenesis, and biochemical studies [1,2].

[0293] Complete kinetic framework established for one ribozyme [3,4,5,6].

[0294] Studies of ribozyme folding and substrate docking underway [7,8,9].

[0295] Chemical modification investigation of important residues well established [10,11].

[0296] The small (4-6 nt) binding site may make this ribozyme too non-specific for targeted RNA cleavage, however, the Tetrahymena group I intron has been used to repair a “defective” β-galactosidase message by the ligation of new β-galactosidase sequences onto the defective message [12].

[0297] RNAse P RNA (M1 RNA)

[0298] Size: ˜290 to 400 nucleotides.

[0299] RNA portion of a ubiquitous ribonucleoprotein enzyme.

[0300] Cleaves tRNA precursors to form mature tRNA [13].

[0301] Reaction mechanism: possible attack by M²⁺-OH to generate cleavage products with 3′-OH and 5′-phosphate.

[0302] RNAse P is found throughout the prokaryotes and eukaryotes. The RNA subunit has been sequenced from bacteria, yeast, rodents, and primates.

[0303] Recruitment of endogenous RNAse P for therapeutic applications is possible through hybridization of an External Guide Sequence (EGS) to the target RNA [14,15]

[0304] Important phosphate and 2′ OH contacts recently identified [16,17]

[0305] Group II Introns

[0306] Size: >1000 nucleotides.

[0307] Trans cleavage of target RNAs recently demonstrated [18,19].

[0308] Sequence requirements not fully determined.

[0309] Reaction mechanism: 2′-OH of an internal adenosine generates cleavage products with 3′-OH and a “lariat” RNA containing a 3′-5′ and a 2′-5′ branch point.

[0310] Only natural ribozyme with demonstrated participation in DNA cleavage [20,21] in addition to RNA cleavage and ligation.

[0311] Major structural features largely established through phylogenetic comparisons [22].

[0312] Important 2′ OH contacts beginning to be identified [23]

[0313] Kinetic framework under development [24]

[0314] Neurospora VS RNA

[0315] Size: ˜144 nucleotides.

[0316] Trans cleavage of hairpin target RNAs recently demonstrated [25].

[0317] Sequence requirements not fully determined.

[0318] Reaction mechanism: attack by 2′-OH 5′ to the scissile bond to generate cleavage products with 2′,3′-cyclic phosphate and 5′-OH ends.

[0319] Binding sites and structural requirements not fully determined.

[0320] Only 1 known member of this class. Found in Neurospora VS RNA.

[0321] Hammerhead Ribozyme

[0322] (see text for references)

[0323] Size: ˜13 to 40 nucleotides.

[0324] Requires the target sequence UH immediately 5′ of the cleavage site.

[0325] Binds a variable number nucleotides on both sides of the cleavage site.

[0326] Reaction mechanism: attack by 2′-OH 5′ to the scissile bond to generate cleavage products with 2′,3′-cyclic phosphate and 5′-OH ends.

[0327] 14 known members of this class. Found in a number of plant pathogens (virusoids) that use RNA as the infectious agent.

[0328] Essential structural features largely defined, including 2 crystal structures [26, 27]

[0329] Minimal ligation activity demonstrated (for engineering through in vitro selection) [28]

[0330] Complete kinetic framework established for two or more ribozymes [29]. Chemical modification investigation of important residues well established [30].

[0331] Hairpin Ribozyme

[0332] Size: ˜50 nucleotides.

[0333] Requires the target sequence GUC immediately 3! of the cleavage site.

[0334] Binds 4-6 nucleotides at the 5′-side of the cleavage site and a variable number to the 3′-side of the cleavage site.

[0335] Reaction mechanism: attack by 2′-OH 5′ to the scissile bond to generate cleavage products with 2′,3′-cyclic phosphate and 5′-OH ends.

[0336] 3 known members of this class. Found in three plant pathogen (satellite RNAs of the tobacco ringspot virus, arabis mosaic virus and chicory yellow mottle virus) which uses RNA as the infectious agent.

[0337] Essential structural features largely defined [31, 32, 33, 34]

[0338] Ligation activity (in addition to cleavage activity) makes ribozyme amenable to engineering through in vitro selection [35]

[0339] Complete kinetic framework established for one ribozyme [36].

[0340] Chemical modification investigation of important residues begun [37, 38].

[0341] Hepatitis Delta Virus (HDV) Ribozyme

[0342] Size: ˜60 nucleotides.

[0343] Trans cleavage of target RNAs demonstrated [39].

[0344] Binding sites and structural requirements not fully determined, although no sequences 5′ of cleavage site are required. Folded ribozyme contains a pseudoknot structure [40].

[0345] Reaction mechanism: attack by 2′-OH 5′ to the scissile bond to generate cleavage products with 2′,3′-cyclic phosphate and 5′-OH ends.

[0346] Only 2 known members of this class. Found in human HDV.

[0347] Circular form of HDV is active and shows increased nuclease stability [41]

[0348] 1. Michel, Francois; Westhof, Eric. Slippery substrates. Nat. Struct. Biol. (1994), 1(1), 5-7.

[0349] 2. Lisacek, Frederique; Diaz, Yolande; Michel, Francois. Automatic identification of group I intron cores in genomic DNA sequences. J. Mol. Biol. (1994), 235(4), 1206-17.

[0350] 3. Herschlag, Daniel; Cech, Thomas R. Catalysis of RNA cleavage by the Tetrahymena thermophila ribozyme. 1. Kinetic description of the reaction of an RNA substrate complementary to the active site. Biochemistry (1990), 29(44), 10159-71.

[0351] 4. Herschlag, Daniel; Cech, Thomas R. Catalysis of RNA cleavage by the Tetrahymena thermophila ribozyme. 2. Kinetic description of the reaction of an RNA substrate that forms a mismatch at the active site. Biochemistry (1990), 29(44), 10172-80.

[0352] 5. Knitt, Deborah S.; Herschlag, Daniel. pH Dependencies of the Tetrahymena Ribozyme Reveal an Unconventional Origin of an Apparent pKa. Biochemistry (1996), 35(5), 1560-70.

[0353] 6. Bevilacqua, Philip C.; Sugimoto, Naoki; Turner, Douglas H. A mechanistic framework for the second step of splicing catalyzed by the Tetrahymena ribozyme. Biochemistry (1996), 35(2), 648-58.

[0354] 7. Li, Yi; Bevilacqua, Philip C.; Mathews, David; Turner, Douglas H. Thermodynamic and activation parameters for binding of a pyrene-labeled substrate by the Tetrahymena ribozyme: docking is not diffusion-controlled and is driven by a favorable entropy change. Biochemistry (1995), 34(44), 14394-9.

[0355] 8. Banerjee, Aloke Raj; Turner, Douglas H. The time dependence of chemical modification reveals slow steps in the folding of a group I ribozyme. Biochemistry (1995), 34(19), 6504-12.

[0356] 9. Zarrinkar, Patrick P.; Williamson, James R. The P9.1-P9.2 peripheral extension helps guide folding of the Tetrahymena ribozyme. Nucleic Acids Res. (1996), 24(5), 854-8.

[0357] 10. Strobel, Scott A.; Cech, Thomas R. Minor groove recognition of the conserved G.cntdot.U pair at the Tetrahymena ribozyme reaction site. Science (Washington, D. C.) (1995), 267(5198), 675-9.

[0358] 11. Strobel, Scott A.; Cech, Thomas R. Exocyclic Amine of the Conserved G.cntdot.U Pair at the Cleavage Site of the Tetrahymena Ribozyme Contributes to 5′-Splice Site Selection and Transition State Stabilization. Biochemistry (1996), 35(4), 1201-11.

[0359] 12. Sullenger, Bruce A.; Cech, Thomas R. Ribozyme-mediated repair of defective mRNA by targeted trans-splicing. Nature (London) (1994), 371(6498), 619-22.

[0360] 13. Robertson, H. D.; Altman, S.; Smith, J. D. J. Biol. Chem., 247, 5243-5251 (1972).

[0361] 14. Forster, Anthony C.; Altman, Sidney. External guide sequences for an RNA enzyme. Science (Washington, D.C., 1883-) (1990), 249(4970), 783-6.

[0362] 15. Yuan, Y.; Hwang, E. S.; Altman, S. Targeted cleavage of mRNA by human RNase P. Proc. Natl. Acad. Sci. USA (1992) 89, 8006-10.

[0363] 16. Harris, Michael E.; Pace, Norman R. Identification of phosphates involved in catalysis by the ribozyme RNase P RNA. RNA (1995), 1(2), 210-18.

[0364] 17. Pan, Tao; Loria, Andrew; Zhong, Kun. Probing of tertiary interactions in RNA: 2′-hydroxyl-base contacts between the RNase P RNA and pre-tRNA. Proc. Natl. Acad. Sci. U.S. A. (1995), 92(26), 12510-14.

[0365] 18. Pyle, Anna Marie; Green, Justin B. Building a Kinetic Framework for Group II Intron Ribozyme Activity: Quantitation of Interdomain Binding and Reaction Rate. Biochemistry (1994), 33(9), 2716-25.

[0366] 19. Michels, William J. Jr.; Pyle, Anna Marie. Conversion of a Group II Intron into a New Multiple-Turnover Ribozyme that Selectively Cleaves Oligonucleotides: Elucidation of Reaction Mechanism and Structure/Function Relationships. Biochemistry (1995), 34(9), 2965-77.

[0367] 20. Zimmerly, Steven; Guo, Huatao; Eskes, Robert; Yang, Jian; Perlman, Philip S.; Lambowitz, Alan M. A group II intron RNA is a catalytic component of a DNA endonuclease involved in intron mobility. Cell (Cambridge, Mass.) (1995), 83(4), 529-38.

[0368] 21. Griffin, Edmund A., Jr.; Qin, Zhifeng; Michels, Williams J., Jr.; Pyle, Anna Marie. Group II intron ribozymes that cleave DNA and RNA linkages with similar efficiency, and lack contacts with substrate 2′-hydroxyl groups. Chem. Biol. (1995), 2(11), 761-70.

[0369] 22. Michel, Francois; Ferat, Jean Luc. Structure and activities of group II introns. Annu. Rev. Biochem. (1995), 64, 435-61.

[0370] 23. Abramovitz, Dana L.; Friedman, Richard A.; Pyle, Anna Marie. Catalytic role of 2′-hydroxyl groups within a group II intron active site. Science (Washington, D.C.) (1996), 271(5254), 1410-13.

[0371] 24. Daniels, Danette L.; Michels, William J., Jr.; Pyle, Anna Marie. Two competing pathways for self-splicing by group II introns: a quantitative analysis of in vitro reaction rates and products. J. Mol. Biol. (1996), 256(1), 31-49.

[0372] 25. Guo, Hans C. T.; Collins, Richard A. Efficient trans-cleavage of a stem-loop RNA substrate by a ribozyme derived from Neurospora VS RNA. EMBO J. (1995), 14(2), 368-76.

[0373] 26. Scott, W. G., Finch, J. T., Aaron, K. The crystal structure of an all RNA hammerhead ribozyme: A proposed mechanism for RNA catalytic cleravage. Cell, (1995), 81, 991-1002.

[0374] 27. McKay, Structure and Function of the Hammerhead ribozyme: an unfinished story. RNA, (1996), 2, 395-403.

[0375] 28. Long, D., Uhlenbeck, O., Hertel, K. Ligation with hammerhead ribozymes. U.S. Pat. No. 5,633,133.

[0376] 29. Hertel, K. J., Herschlag, D., Uhlenbach, O. A kinetic and thermodynamic framework for the hammerhead ribozyme reaction. Biochemistry, (1994), 33, 3374-3385. Beigelman, L., et al., Chemical modifications of hammerhead ribozymes. J. Biol. Che., (1995) 270, 25702-25708.

[0377] 30. Beigelman, L., et al., Chemical modifications of hammerhead ribozymes. J. Biol. Che., (1995) 270, 25702-25708.

[0378] 31. Hampel, Arnold; Tritz, Richard; Hicks, Margaret; Cruz, Phillip. ‘Hairpin’ catalytic RNA model: evidence for helixes and sequence requirement for substrate RNA. Nucleic Acids Res. (1990), 18(2), 299-304.

[0379] 32. Chowrira, Bharat M.; Berzal-Herranz, Alfredo; Burke, John M. Novel guanosine requirement for catalysis by the hairpin ribozyme. Nature (London) (1991), 354(6351), 320-2.

[0380] 33. Berzal-Herranz, Alfredo; Joseph, Simpson; Chowrira, Bharat M.; Butcher, Samuel E.; Burke, John M. Essential nucleotide sequences and secondary structure elements of the hairpin ribozyme. EMBO J. (1993), 12(6), 2567-73.

[0381] 34. Joseph, Simpson; Berzal-Herranz, Alfredo; Chowrira, Bharat M.; Butcher, Samuel E. Substrate selection rules for the hairpin ribozyme determined by in vitro selection, mutation, and analysis of mismatched substrates. Genes Dev. (1993), 7(1), 130-8.

[0382] 35. Berzal-Herranz, Alfredo; Joseph, Simpson; Burke, John M. In vitro selection of active hairpin ribozymes by sequential RNA-catalyzed cleavage and ligation reactions. Genes Dev. (1992), 6(1), 129-34.

[0383] 36. Hegg, Lisa A.; Fedor, Martha J. Kinetics and Thermodynamics of Intermolecular Catalysis by Hairpin Ribozymes. Biochemistry (1995), 34(48), 15813-28.

[0384] 37. Grasby, Jane A.; Mersmann, Karin; Singh, Mohinder; Gait, Michael J. Purine Functional Groups in Essential Residues of the Hairpin Ribozyme Required for Catalytic Cleavage of RNA. Biochemistry (1995), 34(12), 4068-76.

[0385] 38. Schmidt, Sabine; Beigelman, Leonid; Karpeisky, Alexander; Usman, Nassim; Sorensen, Ulrik S.; Gait, Michael J. Base and sugar requirements for RNA cleavage of essential nucleoside residues in internal loop B of the hairpin ribozyme: implications for secondary structure. Nucleic Acids Res. (1996), 24(4), 573-81.

[0386] 39. Perrotta, Anne T.; Been, Michael D. Cleavage of oligoribonucleotides by a ribozyme derived from the hepatitis delta. virus RNA sequence. Biochemistry (1992), 31(1), 16-21.

[0387] 40. Perrotta, Anne T.; Been, Michael D. A pseudoknot-like structure required for efficient self-cleavage of hepatitis delta virus RNA. Nature (London) (1991), 350(6317), 434-6.

[0388] 41. Puttaraju, M.; Perrotta, Anne T.; Been, Michael D. A circular trans-acting hepatitis delta virus ribozyme. Nucleic Acids Res. (1993), 21(18), 4253-8.

TABLE II
A. 2.5 μmol Synthesis Cycle ABI 394 Instrument

| | | | Wait Time | Wait Time* | Wait Time |
|---|---|---|---|---|---|
| Reagent | Equivalents | Amount | *DNA | 2′-O-methyl | *RNA |
| Phosphoramidites | 6.5 | 163 μL | 45 sec | 2.5 min | 7.5 min |
| S-Ethyl Tetrazole | 23.8 | 238 μL | 45 sec | 2.5 min | 7.5 min |
| Acetic Anhydride | 100 | 233 μL | 5 sec | 5 sec | 5 sec |
| N-Methyl Imidazole | 186 | 233 μL | 5 sec | 5 sec | 5 sec |
| TCA | 176 | 2.3 mL | 21 sec | 21 sec | 21 sec |
| Iodine | 11.2 | 1.7 mL | 45 sec | 45 sec | 45 sec |
| Beaucage | 12.9 | 645 μL | 100 sec | 300 sec | 300 sec |
| Acetonitrile | NA | 6.67 MI | NA | NA | NA |

B. 0.2 μmol Synthesis Cycle ABI 394 Instrument

| | | | Wait Time | Wait Time | Wait Time |
|---|---|---|---|---|---|
| Reagent | Equivalents | Amount | *DNA | 2′-O-methyl | RNA |
| Phosphoramidites | 15 | 31 μL | 45 sec | 233 sec | 465 sec |
| S-Ethyl Tetrazole | 38.7 | 31 μL | 45 sec | 233 min | 465 sec |
| Acetic Anhydride | 655 | 124 μL | 5 sec | 5 sec | 5 sec |
| N-Methyl Imidazole | 1245 | 124 μL | 5 sec | 5 sec | 5 sec |
| TCA | 700 | 732 μL | 10 sec | 10 sec | 10 sec |
| Iodine | 20.6 | 244 μL | 15 sec | 15 sec | 15 sec |
| Beaucage | 7.7 | 232 μL | 100 sec | 100 sec | 100 sec |
| Acetonitrile | NA | 2.64 mL | NA | NA | NA |

C. 0.2 μmol Synthesis Cycle 96 well Instrument

| | Equivalents | Amount | Wait Time | Wait Time | Wait Time |
|---|---|---|---|---|---|
| Reagent | DNA/2′-O-methyl/Ribo | DNA/2′-O-methyl/Ribo | * DNA | * 2′-O-methyl | *Ribo |
| Phosphoramidites | 22/33/66 | 40/60/120 μL | 60 sec | 180 sec | 360 sec |
| S-Ethyl Tetrazole | 70/105/210 | 40/60/120 μL | 60 sec | 180 sec | 360 sec |
| Acetic An hydride | 265/265/265 | 50/50/50 μL | 10 sec | 10 sec | 10 sec |
| N-Methyl Imidazole | 502/502/502 | 50/50/50 μL | 10 sec | 10 sec | 10 sec |
| TCA | 238/475/475 | 250/500/500 μL | 15 sec | 15 sec | 15 sec |
| Iodine | 6.8/6.8/6.8 | 80/80/80 μL | 30 sec | 30 sec | 30 sec |
| Beaucage | 34/51/51 | 80/120/120 μL | 100 sec | 200 sec | 200 sec |
| Acetonitrile | NA | 1150/1150/1150 μL | NA | NA | NA |

* Wait time does not include contact time during delivery.

[0389] TABLE III
HCV DNAzyme and Substrate Sequence

| | | | | |
|---|---|---|---|---|
| Pos | Substrate | Seq ID | DNAzyme | Seq ID |

| | | | | |
|---|---|---|---|---|
| 10 | UGGGGGCG A CACUCCAC | 1 | GTGGAGTG GGCTAGCTACAACGA CGCCCCCA | 4798 |
| 12 | GGGGCGAC A CUCCACCA | 2 | TGGTGGAG GGCTAGCTACAACGA GTCGCCCC | 4799 |
| 27 | GACACUCC A CCAUAGAU | 3 | ATCTATGG GGCTAGCTACAACGA CGAGTGTC | 4800 |
| 20 | ACUCCACC A UAGAUCAC | 4 | GTGATCTA GGCTAGCTACAACGA GGTGGAGT | 4801 |
| 24 | CACCAUAG A UCACUCCC | 5 | GGGAGTGA GGCTAGCTACAACGA CTATGGTG | 4802 |
| 27 | CAUAGAUC A CUCCCCUG | 6 | CAGGGGAG GGCTAGCTACAACGA GATCTATG | 4802 |
| 35 | ACUCCCCU G UGAGGAAC | 7 | GTTCCTCA GGCTAGCTACAACGA AGGGGAGT | 4804 |
| 42 | UGUGAGGA A CUACUGUC | 8 | GACAGTAG GGCTAGCTACAACGA TCCTCACA | 4805 |
| 45 | GACGAACU A CUGUCUUC | 9 | GAAGACAG GGCTAGCTACAACGA AGTTCCTC | 4806 |
| 48 | GAACUACU G UCUUCACG | 10 | CGTGAAGA GGCTAGCTACAACGA AGTAGTTC | 4807 |
| 54 | CUGUCUUC A CGCAGAAA | 11 | TTTCTGCG GGCTAGCTACAACGA GAAGACAG | 4808 |
| 56 | GUCUUCAC G CAGAAAGC | 12 | GCTTTCTG GGCTAGCTACAACGA GTGAAGAC | 4809 |
| 63 | CGCAGAAA G CGUCUAGG | 13 | GCTAGACG GGCTAGCTACAACGA TTTCTGCG | 4810 |
| 65 | CAGAAAGC G UCUAGCCA | 14 | TGGCTAGA GGCTAGCTACAACGA GCTTTCTG | 4811 |
| 70 | AGCGUCUA G CCAUGGCG | 15 | CGCCATGG GGCTAGCTACAACGA TAGACGCT | 4812 |
| 73 | GUCUAGCC A UGGCGUUA | 16 | TAACGCGA GGCTAGCTACAACGA GGCTAGAC | 4813 |
| 76 | UAGCCAUG G CGUUAGUA | 17 | TACTAACG GGCTAGCTACAACGA CATGGCTA | 4814 |
| 78 | GCCAUGGC G UUAGUAUG | 18 | CATACTAA GGCTAGCTACAACGA GCCATGGC | 4815 |
| 82 | UGGCGUUA G UAUGAGUG | 19 | CACTCATA GGCTAGCTACAACGA TAACGCCA | 4816 |
| 84 | GCGUUAGU A UGAGUGUC | 20 | GACACTCA GGCTAGCTACAACGA ACTAACGC | 4817 |
| 88 | UAGUAUGA G UGUCGUGC | 21 | GCACGACA GGCTAGCTACAACGA TCATACTA | 4818 |
| 90 | GUAUGAGU G UCGUGCAC | 22 | CTGCACGA GGCTAGCTACAACGA ACTCATAC | 4819 |
| 93 | UCAGUGUC G UGCAGCCU | 23 | AGGCTGCA GGCTAGCTACAACGA CACACTCA | 4820 |
| 95 | ACUCUCCU G CAGCCUCC | 24 | CCACCCTC GGCTAGCTACAACGA ACGACACT | 4821 |
| 98 | GUCGUGCA G CCUCCAGC | 25 | CCTCGAGG GGCTAGCTACAACGA TGCACGAC | 4822 |
| 107 | CCUCCACC A CCCCCCCU | 26 | ACCCCCCC GGCTAGCTACAACGA CCTGGAGC | 4823 |
| 125 | CCGGGAGA G CCAUAGUG | 27 | CACTATGG GGCTAGCTACAACGA TCTCCCGG | 4824 |
| 128 | GGAGAGCC A UAGUGGUC | 28 | GACCACTA GGCTAGCTACAACGA GGCTCTCC | 4825 |
| 131 | GAGCCAUA G UGGUCUGC | 29 | GCAGACGA GGCTAGCTACAACGA TATGGCTC | 4826 |
| 134 | CCAUACUC G UCUGCGGA | 30 | TCCCCAGA GCCTAGCTACAACGA CACTATGG | 4827 |
| 138 | AGUGGUCU G CGGAACCG | 31 | CGGTTCCG GGCTAGCTACAACGA AGACCACT | 4828 |
| 143 | UCUGCGGA A CCGGUGAG | 32 | CTCACCGG GGCTAGCTACAACGA TCCGCAGA | 4829 |
| 147 | CGGAACCG G UGAGUACA | 33 | TGTACTCA GGCTAGCTACAACGA CGGTTCCG | 4830 |
| 151 | ACCGGUGA G UACACCGG | 34 | CCGGTGTA GGCTAGCTACAACGA TCACCGGT | 4831 |
| 153 | CGCUGAGU A CACCGGAA | 35 | TTCCGGTG GGCTAGCTACAACGA ACTCACCG | 4832 |
| 155 | GUGAGUAC A CCCGAAUU | 36 | AATTCCGG GGCTAGCTACAACGA GTACTCAC | 4833 |
| 161 | ACACCGGA A UUGCCAGG | 37 | CCTGGCAA GGCTAGCTACAACGA TCCGGTGT | 4834 |
| 164 | CCGGAAUU G CCAGGACG | 38 | CGTCCTGG GGCTAGCTACAACGA AATTCCGG | 4835 |
| 170 | UUCCCAGG A CGACCGGG | 39 | CCCGGTCG GGCTAGCTACAACGA CCTCGCAA | 4836 |
| 173 | CCAGGACG A CCGGGUCC | 40 | GGACCCGG GGCTAGCTACAACGA CGTCCTGG | 4837 |
| 178 | ACGACCGG G UCCUUUCU | 41 | AGAAAGGA GGCTAGCTACAACGA CCGGTCGT | 4838 |
| 190 | UUUCUUGC A UCAACCCC | 42 | CGGCTTGA GGCTAGCTACAACGA CCAAGAAA | 4839 |
| 194 | UUGGAUCA A CCCGCUCA | 43 | TGACCGGG GGCTAGCTACAACGA TGATCCAA | 4840 |
| 198 | AUCAACCC G CUCAAUCC | 44 | CCATTCAG GGCTAGCTACAACGA GGCTTGAT | 4841 |
| 203 | CCCGCUCA A UCCCUCCA | 45 | TCCAGGCA GGCTAGCTACAACGA TGAGCCCG | 4842 |
| 205 | CGCUCAAU G CCUCCAGA | 46 | TCTCCACG GGCTAGCTACAACGA ATTCAGCG | 4843 |
| 213 | GCCUGGAG A UUUGCGCG | 47 | CGCCCAAA GGCTAGCTACAACGA CTCCAGGC | 4844 |
| 219 | AGAUUUGG G CGUGCCCC | 48 | GGGGCACC GGCTAGCTACAACGA CCAAATCT | 4845 |
| 221 | AUUUGGGC G UGCCCCCG | 49 | CGGGGCGA GGCTAGCTACAACGA GCCCAAAT | 4846 |
| 223 | UUGGGCCU G CCCCCGCG | 50 | CGCCCCCC GGCTAGCTACAACGA ACCCCCAA | 4847 |
| 229 | GUGCCCCC G CCACACUC | 51 | CAGTCTCC GGCTAGCTACAACGA GCCCCCAC | 4848 |
| 234 | CCCGCGAG A CUGCUAGC | 52 | GCTAGCAG GGCTAGCTACAACGA CTCGCGGC | 4849 |
| 237 | GCCACACU G CUAGCCGA | 53 | TCGGCTAG GGCTAGCTACAACGA AGTCTCGC | 4850 |
| 241 | GACUGCUA G CCGAGUAG | 54 | CTACTCGG GGCTAGCTACAACGA TAGCAGTC | 4851 |
| 246 | CUAGCCGA G UAGUGUUG | 55 | CAACACTA GGCTAGCTACAACGA TCGGCTAG | 4852 |
| 249 | GCCGAGUA G UGUUGGGU | 56 | ACCCAACA GGCTAGCTACAACGA TACTCGGC | 4853 |
| 251 | CGAGUAGU G UUGGGUCG | 57 | CGACCCAA GGCTAGCTACAACGA ACTACTCG | 4854 |
| 256 | AGUGUUGG G UCGCGAAA | 58 | TTTCGCGA GGCTAGCTACAACGA CCAAACACT | 4855 |
| 259 | GUUGGGUC G CGAAAGGC | 59 | GCCTTTCG GGCTAGCTACAACGA GACCCAAC | 4856 |
| 266 | CGCGAAAG G CCUUGUGG | 60 | CCACAAGG GGCTAGCTACAACGA CTTTCGCG | 4857 |
| 271 | AAGGCCUU G UGGUACUG | 61 | CAGTACGA GGCTAGCTACAACGA AAGGCCTT | 4858 |
| 274 | GCCUUGUG G UACUGCCU | 62 | AGGCAGTA GGCTAGCTACAACGA CACAAGGC | 4859 |
| 276 | CUUGUGGU A CCUCCUGA | 63 | TCAGGCAG GGCTAGCTACAACGA ACCACAAG | 4860 |
| 279 | GUGGUACU G CCUGAUAG | 64 | CTATCAGG GGCTAGCTACAACGA AUTACCAC | 4861 |
| 284 | ACUGCCUG A UAGGGUGC | 65 | GCACCCTA GGCTAGCTACAACGA CAGGCAGT | 4862 |
| 289 | CUGAUAGG G UGCUUGCG | 66 | CGCAAGCA GGCTAGCTACAACGA CCTATCAG | 4863 |
| 291 | GAUAGGGU G CUUGCGAG | 67 | CTCGCAAG GGCTAGCTACAACGA ACCCTATC | 4864 |
| 295 | GGGUGCUU G CGAGUGCC | 68 | GGCACTCG GGCTAGCTACAACGA AAGCACCC | 4865 |
| 299 | GCUUGCGA G UGCCCCGG | 69 | CCGGGGCA GGCTAGCTACAACGA TCGCAAGC | 4866 |
| 301 | UUGCGAGU G CCCCGGGA | 70 | TCCCGGGG GGCTAGCTACAACGA ACTCGCAA | 4867 |
| 311 | CCCGGGAG G UCUCGUAG | 71 | CTACGAGA GGCTAGCTACAACGA CTCCCCGG | 4868 |
| 316 | GAGGUCUC G UAGACCGU | 72 | ACGGTCTA GGCTAGCTACAACGA GAGACCTC | 4869 |
| 320 | UCUCGUAG A CCGUGCAC | 73 | GTGCACGG GGCTAGCTACAACGA CTACGAGA | 4870 |
| 323 | CGUAGACC G UGCACCAU | 74 | ATGGTGCA GGCTAGCTACAACGA GGTCTACG | 4871 |
| 325 | UAGACCGU G CACCAUGA | 75 | TCATGGTG GGCTAGCTACAACGA ACGGTCTA | 4872 |
| 327 | GACCGUGC A CCAUCACC | 76 | GCTCATGG GGCTAGCTACAACGA GCACGGTC | 4873 |
| 330 | CGUGCACC A UGAGCACG | 77 | CGTGCTCA GGCTAGCTACAACGA GGTGCACG | 4874 |
| 334 | CACCAUGA G CACGAAUC | 78 | GATTCGTG GGCTAGCTACAACGA TCATGGTG | 4875 |
| 336 | CCAUGAGC A CGAAUCCU | 79 | AGGATTCG GGCTAGCTACAACGA GCTCATGG | 4876 |
| 340 | GAGCACCA A UCCUAAAC | 80 | GTTTAGGA GGCTAGCTACAACGA TCGTGCTC | 4877 |
| 347 | AAUCCUAA A CCUCAAAG | 81 | CTTTGAGC GGCTAGCTACAACGA TTAGGATT | 4878 |
| 360 | AAAGAAAA A CCAAACGU | 82 | ACGTTTGG GGCTAGCTACAACGA TTTTCTTT | 4879 |
| 365 | AAAACCAA A CGUAACAC | 83 | GTGTTACG GGCTAGCTACAACGA TTGGTTTT | 4880 |
| 367 | AACCAAAC G UAACACCA | 84 | TGGTGTTA GGCTAGCTACAACGA GTTTGGTT | 4881 |
| 370 | CAAACGUA A CACCAACC | 85 | GCTTGCTC GGCTAGCTACAACGA TACGTTTG | 4882 |
| 372 | AACGUAAC A CCAACCGC | 86 | GCGGTTGG GGCTAGCTACAACGA GTTACCTT | 4883 |
| 376 | UAACACCA A CCGCCGCC | 87 | GGCGGCGG GGCTAGCTACAACGA TGGTGTTA | 4884 |
| 379 | CACCAACC G CCGCCCAC | 88 | GTGCGCGC GGCTAGCTACAACGA CCTTCCTC | 4885 |
| 382 | CAACCGCC G CCCACACG | 89 | CCTCTCGG GGCTAGCTACAACGA GGCGGTTG | 4886 |
| 386 | CGCCGCCC A CACGACGU | 90 | ACCTCCTG GGCTAGCTACAACGA GGGCGGCC | 4887 |
| 391 | CCCACAGG A CGUCAAGU | 91 | ACTTGACC GGCTAGCTACAACGA CCTGTGGC | 4888 |
| 393 | CACAGGAC G UCAAGUUC | 92 | CAACTTGA GGCTAGCTACAACGA GTCCTGTG | 4889 |
| 398 | CACGUCAA G UUCCCGCG | 93 | CCCCGCAA GGCTAGCTACAACGA TTGACCTC | 4890 |
| 406 | GUUCCCGG G CCCUCCUC | 94 | CACCACCC GGCTAGCTACAACGA CCCCCAAC | 4891 |
| 409 | CCCGGGCC G UCCUCACA | 95 | TCTGACGA GGCTAGCTACAACGA CCCCCGCG | 4892 |
| 412 | GGGCGGUG G UCAGAUCG | 96 | CGATCTGA GGCTAGCTACAACGA CACCGCCC | 4893 |
| 417 | GUGGUCAG A UCCUUGCU | 97 | ACCAACGA GGCTAGCTACAACGA CTGACCAC | 4894 |
| 420 | CUCAGAUC G UUCGUGGA | 98 | TCCACCAA GGCTAGCTACAACGA GATCTGAC | 4895 |
| 424 | CAUCGUUG G UGGAGUUU | 99 | AAACTCGA GGCTAGCTACAACGA CAACGATC | 4896 |
| 429 | UUGGUCGA G UUUACCUC | 100 | CACCTAAA GGCTAGCTACAACGA TCCACCAA | 4897 |
| 433 | UGGAGUUU A CCUGUUGC | 101 | CCAACAGC GGCTAGCTACAACGA AAACTCCA | 4898 |
| 437 | GUUUACCU G UUCCCGCG | 102 | CGCGGCAA GGCTAGCTACAACGA ACGTAAAC | 4899 |
| 440 | UACCUCUU G CCCCGCAG | 103 | CTCCCCCG GGCTAGCTACAACGA AACACCTA | 4900 |
| 443 | CUCUUCCC G CCCACCCC | 104 | CCCCTGCG GGCTAGCTACAACGA CCCAACAG | 4901 |
| 445 | GUUCCCGC G CAGGGGCC | 105 | GGCCCCTG GGCTAGCTACAACGA GCGGCAAC | 4902 |
| 451 | GCGCACCG G CCCCACGU | 106 | ACCTCGCG GGCTAGCTACAACGA CCCTCCCC | 4903 |
| 458 | CCCCCCAG G UUGGGUGU | 107 | ACACCCAA GGCTAGCTACAACGA CTCGCCCC | 4904 |
| 463 | CACCUUCG G UGUCCGCG | 108 | CGCGCACA GGCTAGCTACAACGA CCAACCTG | 4905 |
| 465 | GCUUGCCU G UCCCCCCC | 109 | CGCGCCGA GGCTAGCTACAACGA ACCCAACC | 4906 |
| 467 | UUGCGUCU G CCCCCCAC | 110 | CTCGCGCG GGCTAGCTACAACGA ACACCCAA | 4907 |
| 469 | GGGUGUGC G CGCGACUA | 111 | TAGTCGCG GGCTAGCTACAACGA GCACACCC | 4908 |
| 471 | GUGUGCGC G CGACUAGG | 112 | CCTAGTCG GGCTAGCTACAACGA GCGCACAC | 4909 |
| 474 | UGCGCGCG A CUAGGAAG | 113 | CTTCCTAG GGCTAGCTACAACGA CGCGCGCA | 4910 |
| 483 | CUAGGAAG A CUUCCGAG | 114 | CTCGGAAG GGCTAGCTACAACGA CTTCCTAG | 4911 |
| 491 | ACUUCCGA G CGGUCGCA | 115 | TGCGACCG GGCTAGCTACAACGA TCGGAAGT | 4912 |
| 494 | UCCGAGCG G UCGCAACC | 116 | GGTTGCGA GGCTAGCTACAACGA CGCTCGGA | 4913 |
| 497 | GAGCGGUC G CAACCUCG | 117 | CGAGGTTG GGCTAGCTACAACGA GACCGCTC | 4914 |
| 500 | CGGUCGCA A CCUCGUGG | 118 | CCACGAGG GGCTAGCTACAACGA TGCGACCG | 4915 |
| 505 | GCAACCUC G UGGAAGGC | 119 | GCCTTCGA GGCTAGCTACAACGA GAGGTTGC | 4916 |
| 512 | CGUGGAAG G CGACAACC | 120 | GGTTGTCG GGCTAGCTACAACGA CTTCCACG | 4917 |
| 515 | GGAAGGCG A CAACCUAU | 121 | ATAGGTTG GGCTAGCTACAACGA CGCCTTCC | 4918 |
| 518 | AGGCGACA A CCUAUCCC | 122 | GGGATAGG GGCTAGCTACAACGA TGTCGCCT | 4919 |
| 522 | GACAACCU A UCCCCAAG | 123 | CTTGGGGA GGCTAGCTACAACGA AGGTTGTC | 4920 |
| 531 | UCCCCA~G G CUCGCCGG | 124 | CCGGCGAG GGCTAGCTACAACGA CTTGGGGA | 4921 |
| 535 | CAAGGCUC G CCGGCCCG | 125 | CGGGCCGG GGCTAGCTACAACGA GAGCCTT3 | 4922 |
| 539 | GCUCGCCG G CCCGAGGG | 126 | CCCTCGGG GGCTAGCTACAACGA CGGCGAGC | 4923 |
| 547 | GCCCGAGG G CAGGGCCU | 127 | AGGCCCTG GGCTAGCTACAACGA CCTCGGGC | 4924 |
| 552 | AGGGCACG G CCUGGCCU | 128 | AGCCCAGG GGCTAGCTACAACGA CCTGCCCT | 4925 |
| 558 | CGGCCUGG G CUCAGCCC | 129 | GGGCTCAG GGCTAGCTACAACGA CCAGGCCC | 4926 |
| 563 | UGGGCUCA G CCCGCGUA | 130 | TACCCGGG GGCTAGCTACAACGA TGAGCCCA | 4927 |
| 569 | CAGCCCGG G UACCCUUG | 131 | CAAGGGTA GGCTAGCTACAACGA CCGCGCTG | 4928 |
| 571 | GCCCGGGU A CCCUUCGC | 132 | GCCAAGGG GGCTAGCTACAACGA ACCCGGGC | 4929 |
| 578 | UACCCUUG G CCCCUCUA | 133 | TAGAGCCC GGCTAGCTACAACGA CAAGGGTA | 4930 |
| 586 | CCCCCUCU A UGGCAAUG | 134 | CATTGCCA GGCTAGCTACAACGA ACAGCGGC | 4931 |
| 589 | CCUCUAUG G CAAUGACG | 135 | CCTCATTG GGCTAGCTACAACGA CATAGAGG | 4932 |
| 592 | CUAUCCCA A UGAGGGCU | 136 | AGCCCTCA GGCTAGCTACAACGA TGCCATAG | 4933 |
| 598 | CAAUGAGC G CUUAGGGU | 137 | ACCCTAAC GGCTAGCTACAACGA CCTCATTG | 4934 |
| 605 | GGCUUAGG G UGCGCACG | 138 | CCTGCCGA GGCTAGCTACAACGA CCTAACCC | 4935 |
| 609 | UAGCCUCG G CACGAUGG | 139 | CCATCCTG GGCTAGCTACAACGA CCACCCTA | 4936 |
| 614 | UCCCCAGC A UCGCUCCU | 140 | ACCAGCGA GGCTAGCTACAACGA CCTGCCCA | 4937 |
| 617 | CCAGGAUG G CUCCUCUC | 141 | GACAGGAC GGCTAGCTACAACGA CATCCTCC | 4938 |
| 623 | UCCCUCCU G UCACCCCC | 142 | CGGGCTGA GGCTAGCTACAACGA AGGACCCA | 4939 |
| 626 | CUCCUGUC A CCCCGCCG | 143 | CCGCCGCC GGCTAGCTACAACGA GACAGGAG | 4940 |
| 631 | GUCACCCC G CCGCUCCC | 144 | GGGACCCG GGCTAGCTACAACGA CGGCTCAC | 4941 |
| 634 | ACCCCGCG G CUCCCCCC | 145 | GCCGCGAG GGCTAGCTACAACGA CGCGGGGT | 4942 |
| 641 | CGCUCCCC G CCUACUUC | 146 | CAACTACC GGCTAGCTACAACGA CGCCACCC | 4943 |
| 646 | CCGCCCUA G UUCGCGCC | 147 | GGCCCCAA GGCTAGCTACAACGA TAGCCCGG | 4944 |
| 652 | UACUUGGG G CCCCACGC | 148 | CCGTCGGG GGCTAGCTACAACGA CCCAACTA | 4945 |
| 657 | GCGGCCCC A CGCACCCC | 149 | GGGGTCCC GGCTAGCTACAACGA GCGGCCCC | 4946 |
| 661 | CCCCACGG A CCCCCCGC | 150 | GCCCCCGG GGCTAGCTACAACGA CCGTGCGG | 4947 |
| 668 | GACCCCCG G CGUAGGUC | 151 | CACCTACG GGCTAGCTACAACGA CCGGGCTC | 4948 |
| 670 | CCCCCGGC G UACGUCGC | 152 | CCGACCTA GGCTAGCTACAACGA GCCGGGGC | 4949 |
| 674 | CGCCCUAG G UCGCCUAA | 153 | TTACCCGA GGCTAGCTACAACGA CTACGCCC | 4950 |
| 677 | CGUAGCUC G CGUAACUU | 154 | AAGTTACG GGCTAGCTACAACGA GACCTACG | 4951 |
| 679 | UACCUCCC G UAACUUCC | 155 | CCAAGTTA GGCTAGCTACAACGA GCGACCTA | 4952 |
| 682 | GUCCCCUA A CUUGCGUA | 156 | TACCCAAC GGCTAGCTACAACGA TACCCCAC | 4953 |
| 688 | UAACUUGG G UAAGGUCA | 157 | TCACCTTA GGCTAGCTACAACGA CCAAGTTA | 4954 |
| 693 | UCGCUAAC G UCAUCCAU | 158 | ATCCATGA GGCTAGCTACAACGA CTTACCCA | 4955 |
| 696 | CUAACCUC A UCCAUACC | 159 | CCTATCGA GGCTAGCTACAACGA CACCTTAC | 4956 |
| 700 | CGUCAUCC A UACCCUCA | 160 | TCACGGTA GGCTAGCTACAACGA CGATGACC | 4957 |
| 702 | UCAUCCAU A CCCUCACA | 161 | TCTCACCC GGCTAGCTACAACGA ATCCATCA | 4958 |
| 708 | AUACCCUC A CAUCCCCC | 162 | CCCCCATC GGCTAGCTACAACGA CACCCTAT | 4959 |
| 710 | ACCCUCAC A UCCCGCUU | 163 | AACCCGCA GGCTAGCTACAACGA GTCACCCT | 4960 |
| 712 | CCUCACAU G CGCCUUCC | 164 | CCAACCCC GGCTAGCTACAACGA ATCTCACC | 4961 |
| 715 | CACAUCCC G CUUCCCCC | 165 | CCCCCAAC GGCTAGCTACAACGA CCCATCTC | 4962 |
| 720 | CCCCCUUC G CCGACCUC | 166 | CACGTCCC GGCTAGCTACAACGA CAACCCCC | 4963 |
| 724 | CUUCCCCC A CCUCAUCC | 167 | CCATCACC GGCTAGCTACAACGA CCCCCAAC | 4964 |
| 729 | CCGACCUC A UGGGGUAC | 168 | GTACCCGA GGCTAGCTACAACGA GAGGTCGG | 4965 |
| 734 | CUCAUGGG G UACAUUCC | 169 | GGAATGTA GGCTAGCTACAACGA CCCATGAG | 4966 |
| 736 | CAUGGGGU A CAUUCCGC | 170 | GCGGAATG GGCTAGCTACAACGA ACCCCATG | 4967 |
| 738 | UGGGGUAC A UUCCGCUC | 171 | GAGCGGAA GGCTAGCTACAACGA GTACCCCA | 4968 |
| 743 | UACAUUCC G CUCGUCGG | 172 | CCGACGAG GGCTAGCTACAAACGA GGAATGTA | 4969 |
| 747 | UUCCGCUC G UCGGCGCC | 173 | GGCGCCGA GGCTAGCTACAACGA GAGCGGAA | 4970 |
| 751 | GCUCGUCG G CGCCCCCU | 174 | AGGGGGCG GGCTAGCTACAACGA CGACGAGC | 4971 |
| 753 | UCGUCGGC G CCCCCUUG | 175 | CAAGGGGC3 GGCTAGCTACAACGA GCCGACGA | 4972 |
| 766 | CUUGGGAG G CACTTGCGA | 176 | TGGCAGTG GGCTAGCTACAACGA CTCCCAAG | 4973 |
| 768 | UGGGAGGC A CUGCCAGG | 177 | CCTGGCAG GGCTAGCTACAACGA GCCTCCCA | 4974 |
| 771 | GAGGCACU G CCAGGGCC | 178 | GGCCCTGG GGCTAGCTACAAACGA AGTGCCTC | 4975 |
| 777 | CUGCCAGG G CCCUGGCG | 179 | CGCCAGGG GGCTAGCTACAACGA CCTCGCAC | 4976 |
| 783 | GGCCCCUG G CGCAUGGC | 180 | GCCATGCG GGCTAGCTACAACGA CAGGGCCC | 4977 |
| 785 | GCCCUGGC G CAUGCCGU | 181 | ACGCCATG GGCTAGCTACAACGA GCCAGGGC | 4978 |
| 787 | CCUCGCGC A UGCCGUCC | 182 | GGACGCGA GGCTAGCTACAACGA GCGCCAGG | 4979 |
| 790 | CGCCCAUG G CGUCCCGG | 183 | CCCGGACG GGCTAGCTACAACGA CATGCGCC | 4980 |
| 792 | CGCAUGGC G UCCGGCUU | 184 | AACCCCGA GGCTAGCTACAACGA CCCATGCG | 4981 |
| 798 | CCGUCCGG G UUCUGCAA | 185 | TTCCACAA GGCTAGCTACAACGA CCGGACCC | 4982 |
| 808 | UCUGGAAG A CCGCGUGA | 186 | TCACGCCG GGCTAGCTACAACGA CTTCCAGA | 4983 |
| 811 | GGAAGACG G CGUCAACU | 187 | AGTTCACC GGCTAGCTACAACGA CCTCTTCC | 4984 |
| 813 | AACACGCC G UGAACUAU | 188 | ATAGTTCA GGCTAGCTACAACGA GCCGTCTT | 4985 |
| 817 | CCCCCUCA A CUAUGCAA | 189 | TTCCATAC GGCTAGCTACAACGA TCACGCCC | 4986 |
| 820 | CGUGAACU A UGCAACAG | 190 | CTGTTCGA GGCTAGCTACAACGA ACTTCACG | 4987 |
| 822 | UGAACUAU G CAACAGCG | 191 | CCCTGTTC GGCTAGCTACAACGA ATACTTCA | 4988 |
| 825 | ACUAUGCA A CAGGGAAU | 192 | ATTCCCTC GGCTAGCTACAACGA TCCATAGT | 4989 |
| 832 | AACAGCCA A UCUCCCCG | 193 | CCCGCAGA GGCTAGCTACAACGA TCCCTGTT | 4990 |
| 836 | CCCAAUCU G CCCCGUUC | 194 | CAACCGCG GGCTAGCTACAACGA AGATTCCC | 4991 |
| 841 | UCUCCCCG G UUGCUCUU | 195 | AACACCAA GGCTAGCTACAACGA CGCGCAGA | 4992 |
| 844 | GCCCGGUU G CUCUUUCU | 196 | ACAAAGAG GGCTAGCTACAACGA AACCCCGC | 4993 |
| 855 | CUUUCUCU A UCUUCCUC | 197 | GACGAAGA GGCTAGCTACAACGA AGAGAAAG | 4994 |
| 867 | UCCUCUUC G CUCUGCUC | 198 | CAGCACAG GGCTAGCTACAACGA CAAGAGGA | 4995 |
| 872 | UUCCCUCU G CUCCCCUC | 199 | CACGGCAG GGCTAGCTACAACGA ACAGCCAA | 4996 |
| 875 | CCUCUGCU G CCCUCUCU | 200 | AGACACGC GGCTAGCTACAACGA AGCAGACC | 4997 |
| 880 | GCUGCCCU G UCUGACCA | 201 | TGGTCACA GGCTAGCTACAACGA AGGGCAGC | 4998 |
| 885 | CCUGUCUC A CCAUCCGA | 202 | TGGGATGC GGCTAGCTACAACGA CACACAGG | 4999 |
| 888 | GUCUGACC A UCCCAGCC | 203 | GGCTGGGA GGCTAGCTACAACGA GGTCAGAC | 5000 |
| 894 | CCAUCCGA G CCUCCGCU | 204 | AGCGGACG GGCTAGCTACAACGA TCGGATGG | 5001 |
| 900 | CAGCCUCC G CUUAUGAC | 205 | CTCATAAG GGCTAGCTACAACGA GGAGGCTG | 5002 |
| 904 | CUCCCCUU A UGACGUCU | 206 | ACACCTCA GGCTAGCTACAACGA AACCCGAG | 5003 |
| 909 | CUUAUGAC G UGUCCAAC | 207 | GTTGCACA GGCTAGCTACAACGA CTCATAAG | 5004 |
| 911 | UAUCAGGU G UCCAACCC | 208 | CCCTTGCA GGCTAGCTACAACGA ACCTCATA | 5005 |
| 913 | UCACCUGU G CAACGCCU | 209 | ACCCCTTC GGCTAGCTACAACGA ACACCTCA | 5006 |
| 916 | CCUCUCCA A CCCCUCCC | 210 | CCCACCCG GGCTAGCTACAACGA TGCACACC | 5007 |
| 918 | UCUCCAAC G CCUCCCCC | 211 | CCCCCACC GGCTAGCTACAACGA CTTCCACA | 5008 |
| 920 | UGCAACCC G UCCCCCCU | 212 | ACCCCCGA GGCTAGCTACAACGA CCCTTCCA | 5009 |
| 926 | CCGUCCCC G CUGUACCA | 213 | TGGTACAC GGCTAGCTACAACGA CCCCACCC | 5010 |
| 929 | UCCCCCCU G UACCAUCU | 214 | ACATCCTA GGCTAGCTACAACGA ACCCCCCA | 5011 |
| 931 | CGCCCUCU A CCAUCUCA | 215 | TGACATCC GGCTAGCTACAACGA ACAGCCCC | 5012 |
| 934 | CCUCUACC A UCUCACCA | 216 | TCCTCACA GGCTAGCTACAACGA GCTACACC | 5013 |
| 936 | UCUACCAU G UCACCAAC | 217 | CTTCCTCA GGCTAGCTACAACGA ATCCTACA | 5014 |
| 939 | ACCAUCUC A CCAACCAU | 218 | ATCCTTCG GGCTAGCTACAACGA CACATCCT | 5015 |
| 943 | UCUCACCA A CGAUUCCU | 219A | CCAATCC GGCTAGCTACAACGA TCCTCACA | 5016 |
| 946 | CACGAACC A UUGCUCGA | 220 | TGCAGCAA GGCTAGCTACAACGA CGTTCCTC | 5017 |
| 949 | CAACCAUU G CUCCAACU | 221 | ACTTCCAC GGCTAGCTACAACGA AATCGTTC | 5018 |
| 955 | UUCCUCCA A CUCAACCA | 222 | TCCTTCAC GGCTAGCTACAACGA TGCACCAA | 5019 |
| 961 | CAACUCAA G CAUUCUCU | 223 | ACACAATC GGCTAGCTACAACGA TTGAGTTC | 5020 |
| 963 | ACUCAACC A UUGUGUAU | 224 | ATACACAA GGCTAGCTACAACGA CCTTGAGT | 5021 |
| 966 | CAAGCAUU G UGUAUGAG | 225 | CTCATACA GGCTAGCTACAACGA AATGCTTG | 5022 |
| 968 | AGCAUUGU G UAUGAGGC | 226 | GCCTCATA GGCTAGCTACAACGA ACAATGCT | 5023 |
| 970 | CAUUGUGU A UGAGGCAG | 227 | CTGCCTCA GGCTAGCTACAACGA ACACAATG | 5024 |
| 975 | UGUAUGAG G CACAGGAC | 228 | GTCCTCTG GGCTAGCTACAACGA CTCATACA | 5025 |
| 982 | GGCAGAGG A CAUGAUCA | 229 | TGATCATG GGCTAGCTACAACGA CCTCTGCC | 5026 |
| 984 | CAGAGGAC A UGAUCAUG | 230 | CATGATCA GGCTAGCTACAACGA GTCCTCTG | 5027 |
| 987 | AGGACAUG A UCAUGCAC | 231 | GTGCATGA GGCTAGCTACAACGA CATGTCCT | 5028 |
| 990 | ACAUGAUC A UGCACACC | 232 | GGTGTGCA GGCTAGCTACAACGA GATCATGT | 5029 |
| 992 | AUGAUCAU G CACACCCC | 233 | GGGGTGTG GGCTAGCTACAACGA ATGATCAT | 5030 |
| 994 | GAUCAUGC A CACCCCGG | 234 | CCGGGGTG GGCTAGCTACAACGA GCATGATC | 5031 |
| 996 | UCAUGCAC A CCCCGGGG | 235 | CCCCGGGG GGCTAGCTACAACGA GTGCATGA | 5032 |
| 1004 | ACCCCGGG G UGCGUGCC | 236 | GGCACGCA GGCTAGCTACAACGA CCCGGGGT | 5033 |
| 1006 | CCCGGGGU G CGUGCCCU | 237 | AGGGCACG GGCTAGCTACAACGA ACCCCGGG | 5034 |
| 1008 | CGGGGUGC G UGCCCUGC | 238 | GCAGGGCA GGCTAGCTACAACGA GCACCCCG | 5035 |
| 1010 | GGGUCCCU G CCCUCCGU | 239 | ACCCACCC GGCTAGCTACAACGA ACCCACCC | 5036 |
| 1015 | CCUGCCCU G CCUUCGCG | 240 | CCCGAACG GGCTAGCTACAACGA ACGGCACG | 5037 |
| 1017 | UGCCCUGC G UUCGGGAC | 241 | CTCCCCAA GGCTAGCTACAACGA GCAGGGCA | 5038 |
| 1027 | UCGGGAGA A CAACUCCU | 242 | AGGAGTTG GGCTAGCTACAACGA TCTCCCGA | 5039 |
| 1030 | GGAGAACA A CUCCUCCC | 243 | GGGAGGAG GGCTAGCTACAACGA TGTTCTCC | 5040 |
| 1039 | CUCCUCCC G CUGCUGGG | 244 | CCCAGCAG GGCTAGCTACAACGA GGGAGGAG | 5041 |
| 1042 | CUCCCGCU G CUGGGUAG | 245 | CTACCCAG GGCTAGCTACAACGA AGCGGGAG | 5042 |
| 1047 | GCUGCUGG G UAGCGCUC | 246 | GAGCGCTA GGCTAGCTACAACGA CCAGCAGC | 5043 |
| 1050 | GCUGGGUA G CGCUCACU | 247 | AGTGAGCG GGCTAGCTACAACGA TACCCAGC | 5044 |
| 1052 | UGGGUAGC G CUCACUCC | 248 | GGAGTGAG GGCTAGCTACAACGA GCTACCCA | 5045 |
| 1056 | UAGCGCUC A CUCCCACG | 249 | CGTGGGAG GGCTAGCTACAACGA GAGCGCTA | 5046 |
| 1062 | UCACUCCC A CGCUCGCG | 250 | CGCGAGCG GGCTAGCTACAACGA GGGAGTGA | 5047 |
| 1064 | ACUCCCAC G CUCGCGGC | 251 | GCCGCGAG GGCTAGCTACAACGA GTGGGAGT | 5048 |
| 1068 | CCACGCUC G CGGCCAGG | 252 | CCTGGCCG GGCTAGCTACAACGA GAGCGTGG | 5049 |
| 1071 | CGCUCGCG G CCAGGAAU | 253 | ATTCCTGG GGCTAGCTACAACGA CGCGAGCG | 5050 |
| 1078 | GGCCAGGA A UGCCAGCA | 254 | TGCTGGCA GGCTAGCTACAACGA TCCTGGCC | 5051 |
| 1080 | CCAGGAAU G CCAGCAUC | 255 | GATGCTGG GGCTAGCTACAACGA ATTCCTGG | 5052 |
| 1084 | GAAUGCGA G CAUCCCGA | 256 | TGGGGATG GGCTAGCTACAACGA TGGCATTC | 5053 |
| 1086 | AUGCCAGC A UCCCCACU | 257 | AGTGGGGA GGCTAGCTACAACGA GCTGGCAT | 5054 |
| 1092 | GCAUCCCC A CUACGACG | 258 | CGTCGTAG GGCTAGCTACAACGA GGGGATGC | 5055 |
| 1095 | UCCCCACU A CGACGAUA | 259 | TATCGTCG GGCTAGCTACAACGA AGTGGGGA | 5056 |
| 1098 | CCACUACG A CGAUACGG | 260 | CCGTATCG GGCTAGCTACAACGA CGTAGTGG | 5057 |
| 1101 | CUACGACG A UACGGCGU | 261 | ACGCCGTA GGCTAGCTACAACGA CGTCGTAG | 5058 |
| 1103 | ACGACGAU A CGGCGUCA | 262 | TGACGCCG GGCTAGCTACAACGA ATCGTCGT | 5059 |
| 1106 | ACGAUACG G CGUCACGU | 263 | ACGTGACG GGCTAGCTACAACGA CGTATCGT | 5060 |
| 1108 | GAUACGGC G UCACGUCG | 264 | CGACGTGA GGCTAGCTACAACGA GCCGTATC | 5061 |
| 1111 | ACGGCGUC A CGUCGAUU | 265 | AATCGACG GGCTAGCTACAACGA GACGCCGT | 5062 |
| 1113 | GGCGUCAC G UCGAUUUG | 266 | CAAATCGA GGCTAGCTACAACGA GTGACGCC | 5063 |
| 1117 | UCACGUCG A UUUGCUCG | 267 | CGAGCAAA GGCTAGCTACAACGA CGACGTGA | 5064 |
| 1121 | GUCGAUUU G CUCGUUGG | 268 | CCAACGAG GGCTAGCTACAACGA AAATCGAC | 5065 |
| 1125 | AUUUGCUC G UUGGGGCG | 269 | CGCCCCAA GGCTAGCTACAACGA GACCAAAT | 5066 |
| 1131 | UCGUUCCG G CGGCUGCU | 270 | ACCACCCG GGCTAGCTACAACGA CCCAACGA | 5067 |
| 1134 | UUGCGGCG G CUGCUUUC | 271 | CAAACCAG GGCTAGCTACAACGA CCCCCCAA | 5068 |
| 1137 | GGGCGGCU G CUUUCUGC | 272 | GCACAAAC GGCTAGCTACAACGA AGCCGCCC | 5069 |
| 1144 | UCCUUUCU G CUCUGCUA | 273 | TACCACAC GGCTAGCTACAACGA ACAAACCA | 5070 |
| 1149 | UCUCCUCU G CUAUCUAC | 274 | CTACATAC GGCTAGCTACAACGA ACACCACA | 5071 |
| 1152 | CCUCUCCU A UCUACCUC | 275 | CACCTACA GGCTAGCTACAACGA ACCACACC | 5072 |
| 1154 | UCUCCUAU G UACCUGCG | 276 | CCCACCTA GGCTAGCTACAACGA ATACCACA | 5073 |
| 1156 | UCCUAUCU A CGUGGGGG | 277 | CCCCCACG GGCTAGCTACAACGA ACATACCA | 5074 |
| 1158 | CUAUCUAC G UGCGCGAU | 278 | ATCCCCGA GGCTAGCTACAACGA CTACATAC | 5075 |
| 1165 | CCUCCCCC A UCUCUGCG | 279 | CCCACACA GGCTAGCTACAACGA CCCCCACC | 5076 |
| 1171 | GGAUCUCU G CGGAUCUG | 280 | CAGATCCG GGCTAGCTACAACGA ACACATCC | 5077 |
| 1175 | CUCUGCGG A UCUGUCUU | 281 | AAGACAGA GGCTAGCTACAACGA CCCCACAG | 5078 |
| 1179 | GCGGAUCU G UCUUCCUC | 282 | GAGGAAGA GGCTAGCTACAACGA AGATCCGC | 5079 |
| 1188 | UCUUCCUC G UCUCUCAG | 283 | CTGAGAGA GGCTAGCTACAACGA GAGGAAGA | 5080 |
| 1196 | GUCUCUCA G CUGUUCAC | 284 | GTGAACAG GGCTAGCTACAACGA TGAGAGAC | 5081 |
| 1199 | UCUCAGCU G UUCACCUU | 285 | AAGGTGAA GGCTAGCTACAACGA AGCTGAGA | 5082 |
| 1203 | AGCUGUUC A CCUUCUCG | 286 | CGAGAAGG GGCTAGCTACAACGA GAACAGCT | 5083 |
| 1211 | ACCUUCUC G CCUCGCCG | 287 | CGGCGAGG GGCTAGCTACAACGA GAGAAGCT | 5084 |
| 1216 | CUCGCCUC G CCGGUAUG | 288 | CATACCGG GGCTAGCTACAACGA GAGGCGAG | 5085 |
| 1220 | CCUCGCCG G UAUGAGAC | 289 | GTCTCATA GGCTAGCTACAACGA CGGCGAGG | 5086 |
| 1222 | UCGCCGGU A UGAGACAG | 290 | CTGTCTCA GGCTAGCTACAACGA ACCGGCGA | 5087 |
| 1227 | GGUAUGAG A CAGUACAG | 291 | CTGTACTG GGCTAGCTACAACGA CTCATACC | 5088 |
| 1230 | AUGAGACA G UACAGGAC | 292 | GTCCTGTA GGCTAGCTACAACGA TGTCTCAT | 5089 |
| 1232 | GAGACAGU A CAGGACUG | 293 | CAGTCCTG GGCTAGCTACAACGA ACTGTCTC | 5090 |
| 1237 | AGUACAGG A CUGUAAUU | 294 | AATTACAG GGCTAGCTACAACGA CCTGTACT | 5091 |
| 1240 | ACAGGACU G UAAUUGCU | 295 | AGCAATTA GGCTAGCTACAACGA AGTCCTGT | 5092 |
| 1243 | GGACUGUA A UUGCUCGA | 296 | TCGAGCAA GGCTAGCTACAACGA TACAGTCC | 5093 |
| 1246 | CUGUAAUU G CUCGAUCU | 297 | AGATCGAG GGCTAGCTACAACGA AATTACAG | 5094 |
| 1251 | AUUGCUCG A UCUAUCCC | 298 | GGGATAGA GGCTAGCTACAACGA CGAGCAAT | 5095 |
| 1255 | CUCGAUCU A UCCCGGCC | 299 | GGCCGGGA GGCTAGCTACAACGA AGATCGAG | 5096 |
| 1261 | CUAUCCCG G CCACGUAU | 300 | ATACGTGG GGCTAGCTACAACGA CGGGATAG | 5097 |
| 1264 | UCCCGGCC A CGUAUCAG | 301 | CTGATACG GGCTAGCTACAACGA GGCCGGGA | 5098 |
| 1266 | CCGGCCAC G UAUCAGGC | 302 | GCCTGATA GGCTAGCTACAACGA GTGGCCGG | 5099 |
| 1268 | GGCCACGU A UCAGGCGA | 303 | TGGCCTGA GGCTAGCTACAACGA ACGTGGCC | 5100 |
| 1273 | CGUAUCAG G CCAUCGCA | 304 | TGCGATGG GGCTAGCTACAACGA CTGATACG | 5101 |
| 1276 | AUCAGGCC A UCGCAUGG | 305 | CCATGCGA GGCTAGCTACAACGA GGCCTGAT | 5102 |
| 1279 | AGGCCAUC G CAUGGCUU | 306 | AAGCCATG GGCTAGCTACAACGA GATGGCCT | 5103 |
| 1281 | GCCAUCGC A UGGCUUGG | 307 | CCAAGCGA GGCTAGCTACAACGA GCGATGGC | 5104 |
| 1284 | AUCGCAUG G CUUGGGAU | 308 | ATCCCAAG GGCTAGCTACAACGA CATGCGAT | 5105 |
| 1291 | GGCUUGGG A UAUGAUGA | 309 | TCATCATA GGCTAGCTACAACGA CCCAAGCC | 5106 |
| 1293 | CUUGGGAU A UGAUGAUG | 310 | CATCATCA GGCTAGCTACAACGA ATCCCAAG | 5107 |
| 1296 | GGGAUAUG A UGAUGAAU | 311 | ATTCATCA GGCTAGCTACAACGA CATATCCC | 5108 |
| 1299 | AUAUGAUG A UGAAUUGG | 312 | CCAATTCA GGCTAGCTACAACGA CATCATAT | 5109 |
| 1303 | GAUGAUGA A UUGGUCAC | 313 | GTGACCAA GGCTAGCTACAACGA TCATCATC | 5110 |
| 1307 | AUGAAUUG G UCACCUAC | 314 | GTAGGTGA GGCTAGCTACAACGA CAATTCAT | 5111 |
| 1310 | AAUUGGUC A CCUACAAC | 315 | GTTGTAGG GGCTAGCTACAACGA GACCAATT | 5112 |
| 1314 | GGUCACCU A CAACAGCC | 316 | GGCTGTTG GGCTAGCTACAACGA AGGTGACC | 5113 |
| 1317 | CACCUACA A CAGCCCUA | 317 | TAGGGCTG GGCTAGCTACAACGA TGTAGGTG | 5114 |
| 1320 | CUACAACA G CCCUAGUG | 318 | CACTAGGG GGCTAGCTACAACGA TGTTGTAG | 5115 |
| 1326 | CAGCCCUA G UGGUAUCG | 319 | CGATACGA GGCTAGCTACAACGA TAGGGCTG | 5116 |
| 1329 | CCCUAGUG G UAUCGCAG | 320 | CTGCGATA GGCTAGCTACAACGA CACTAGGG | 5117 |
| 1331 | CUAGUGGU A UCGCAGUU | 321 | AACTGCGA GGCTAGCTACAACGA ACCACTAG | 5118 |
| 1334 | GUGGUAUC G CAGUUGCU | 322 | AGCAACTG GGCTAGCTACAACGA GATACCAC | 5119 |
| 1337 | GUAUCGCA G UUGCUCCG | 323 | CGGAGCAA GGCTAGCTACAACGA TGCGATAC | 5120 |
| 1340 | UCGCAGUU G CUCCGGAU | 324 | ATCCGGAG GGCTAGCTACAACGA AACTGCGA | 5121 |
| 1347 | UGCUCCGG A UCCCACAA | 325 | TTGTGGGA GGCTAGCTACAACGA CCGGAGCA | 5122 |
| 1352 | CGGAUCCC A CAAGCCGU | 326 | ACGGCTTG GGCTAGCTACAACGA GGGATCCG | 5123 |
| 1356 | UCCCACAA G CCGUCGUG | 327 | CACGACGG GGCTAGCTACAACGA TTGTGGGA | 5124 |
| 1359 | CACAAGCC G UCGUGGAC | 328 | GTCCACGA GGCTAGCTACAACGA GGCTTGTG | 5125 |
| 1362 | AAGCCGUC G UGGACAUG | 329 | CATGTCGA GGCTAGCTACAACGA GACGGCTT | 5126 |
| 1366 | CGUCGUGG A CAUGGUGG | 330 | CCACCATG GGCTAGCTACAACGA CCACGACG | 5127 |
| 1368 | UCCUGGAC A UGGUGGCG | 331 | CGCCACGA GGCTAGCTACAACGA GTCCACGA | 5128 |
| 1371 | UGGACAUG G UGGCGGGG | 332 | CCCCGCGA GGCTAGCTACAACGA CATGTCCA | 5129 |
| 1374 | ACAUGGUG G CCGGGGCC | 333 | CGCCCCCG GGCTAGCTACAACGA CACCATGT | 5130 |
| 1380 | UGGCGGGG G CCCACUGG | 334 | CCAGTGGG GGCTAGCTACAACGA CCCCGCCA | 5131 |
| 1384 | GCGGGCCC A CUGGGGAG | 335 | CTCCCCAC GGCTAGCTACAACGA GGGCCCCC | 5132 |
| 1392 | ACUGGGGA G UCCUGGCG | 336 | CGCCAGGA GGCTAGCTACAACGA TCCCCAGT | 5133 |
| 1398 | GAGUCCUG G CGGGCCUU | 337 | AAGGCCCG GGCTAGCTACAACGA CAGGACTC | 5134 |
| 1402 | CCUCGCGG G CCUUGCCU | 338 | AGCCAAGG GGCTAGCTACAACGA CCGCCAGG | 5135 |
| 1407 | CGGGCCUU G CCUAUUAU | 339 | ATAATAGG GGCTAGCTACAACGA AAGGCCCG | 5136 |
| 1411 | CCUUGCCU A UUAUUCGA | 340 | TGGAATAA GGCTAGCTACAACGA AGGCAAGG | 5137 |
| 1414 | UGCCUAUU A UUCCAUGG | 341 | CCATGGAA GGCTAGCTACAACGA AATAGGCA | 5138 |
| 1419 | AUUAUUCC A UGGUGGGG | 342 | CCCCACGA GGCTAGCTACAACGA GGAATAAT | 5139 |
| 1422 | AUUCCAUG G UGGGGAAC | 343 | GTTCCCGA GGCTAGCTACAACGA CATGGAAT | 5140 |
| 1429 | GGUGGGGA A CUGGGCUA | 344 | TAGCCCAG GGCTAGCTACAACGA TCCCCACC | 5141 |
| 1434 | GGAACUGG G CUAAGGUG | 345 | CACCTTAG GGCTAGCTACAACGA CCAGTTCC | 5142 |
| 1440 | GGGCUAAG G UGUUGAUU | 346 | AATCAACA GGCTAGCTACAACGA CTTAGCCC | 5143 |
| 1442 | GCUAAGGU G UUGAUUGU | 347 | ACAATCAA GGCTAGCTACAACGA ACCTTAGC | 5144 |
| 1446 | AGCUGUUG A UUGUCAUG | 348 | CATCACAA GGCTAGCTACAACGA CAACACCT | 5145 |
| 1449 | UGUUGAUU G UGAUGCUA | 349 | TAGCATCA GGCTAGCTACAACGA AATCAACA | 5146 |
| 1452 | UCAUUCUC A UGCUACUC | 350 | GAGTAGCA GGCTAGCTACAACGA CACAATCA | 5147 |
| 1454 | AUUGUCAU G CUACUCUU | 351 | AAGAGTAG GGCTAGCTACAACGA ATCACAAT | 5148 |
| 1457 | GUGAUCCU A CUCUUUGC | 352 | GCAAAGAG GGCTAGCTACAACGA AGCATCAC | 5149 |
| 1464 | UACUCUUU G CCGGCGUU | 353 | AACGCCGC GGCTAGCTACAACGA AAAGAGTA | 5150 |
| 1468 | CUUUGCCG G CCUUGACG | 354 | CGTCAACG GGCTAGCTACAACGA CCGCAPAG | 5151 |
| 1470 | UUGCCGGC G UUGACGGG | 355 | CCCGTCAA GGCTAGCTACAACGA GCCGGCAA | 5152 |
| 1474 | CGCCGUUC A CGGGGACA | 356 | TGTCCCCG GGCTAGCTACAACGA CAACGCCG | 5153 |
| 1480 | UGACGGGG A CACCUACA | 357 | TGTAGGTG GGCTAGCTACAACGA CCCCGTCA | 5154 |
| 1482 | ACGCCCAC A CCUACACG | 358 | CCTCTAGC GGCTAGCTACAACGA CTCCCCGT | 5155 |
| 1486 | GGACACCU A CACGACAG | 359 | CTCTCGTG GGCTAGCTACAACGA ACGTCTCC | 5156 |
| 1488 | ACACCUAC A CGACACCC | 360 | CCCTCTCC GGCTAGCTACAACGA GTAGGTCT | 5157 |
| 1491 | CCUACACG A CAGGCGGG | 361 | CCCCCCTG GGCTAGCTACAACGA CCTGTAGG | 5158 |
| 1500 | CAGCGGGG G CGCACCGC | 362 | CCCCTCCC GGCTAGCTACAACGA CCCCCCTC | 5159 |
| 1502 | CCGGCGGC G CACCCCGA | 363 | TCCCCCTC GGCTAGCTACAACGA GCCCCCCC | 5160 |
| 1507 | GGCGCACG G CCACACGA | 364 | TGGTGTGC GGCTAGCTACAACGA CCTGCGCC | 5161 |
| 1510 | GCACCCCC A CACCACUA | 365 | TAGTGGTC GGCTAGCTACAACGA CGCCCTCC | 5162 |
| 1512 | ACCCCCAC A CCACUACU | 366 | ACTAGTGC GGCTAGCTACAACGA GTGCCCCT | 5163 |
| 1515 | GCCACACC A CUAGUACG | 367 | CCTACTAG GGCTAGCTACAACGA CCTCTGGC | 5164 |
| 1519 | CACCACUA G UACCGUGG | 368 | CCACCCTA GGCTAGCTACAACGA TAGTCCTC | 5165 |
| 1524 | CUACUACC G UCCCAUCC | 369 | CCATGCGA GGCTAGCTACAACGA CCTACTAC | 5166 |
| 1527 | GUACCGUC G CAUCCCUC | 370 | GAGCCATC GGCTAGCTACAACGA CACCCTAC | 5167 |
| 1529 | ACCCUGGC A UCCCUCUU | 371 | AACACGCA GGCTAGCTACAACGA GCCACCCT | 5168 |
| 1539 | CCCUCUUU A CAUCUGGA | 372 | TCCACATG GGCTAGCTACAACGA AAAGACCC | 5169 |
| 1541 | CUCUUUAC A UCUGGAGC | 373 | GCTCCACA GGCTAGCTACAACGA GTAAAGAG | 5170 |
| 1548 | CAUCUCGA G CAUCUCAC | 374 | CTGAGATC GGCTAGCTACAACGA TCCACATG | 5171 |
| 1550 | UCUCGAGC A UCUCACAA | 375 | TTCTGACA GGCTAGCTACAACGA GCTCCAGA | 5172 |
| 1558 | AUCUCAGA A UAUCCACC | 376 | CCTCCATA GGCTAGCTACAACGA TCTGACAT | 5173 |
| 1560 | CUCAGAAU A UCCAGCUU | 377 | AACCTCGA GGCTAGCTACAACGA ATTCTGAG | 5174 |
| 1565 | AAUAUCGA G CUUAUUAA | 378 | TTAATAAC GGCTAGCTACAACGA TCCATATT | 5175 |
| 1569 | UCCAGCUU A UUAACACC | 379 | CGTGTTAA GGCTAGCTACAACGA AACCTCGA | 5176 |
| 1573 | CCUUAUUA A CACCAACC | 380 | CCTTCCTG GGCTAGCTACAACGA TAATAACC | 5177 |
| 1575 | UUAUUAAC A CCAACCCC | 381 | CCCCTTCC GGCTAGCTACAACGA GTTAATAA | 5178 |
| 1579 | UAACACCA A CCCCAGCU | 382 | ACCTGCCC GGCTAGCTACAACGA TCCTCTTA | 5179 |
| 1582 | CACCAACC G CACCUCCC | 383 | CCCACCTC GGCTAGCTACAACGA CCTTCCTC | 5180 |
| 1585 | CAACCCGA G CUCCCACA | 384 | TCTCCCAC GGCTAGCTACAACGA TCCCCTTC | 5181 |
| 1589 | CGCAGCUG G CACAUUAA | 385 | TTAATGTG GGCTAGCTACAACGA CAGCTCCC | 5182 |
| 1591 | CACCUCCC A CAUUAACA | 386 | TCTTAATC GGCTAGCTACAACGA CCCACCTC | 5183 |
| 1593 | CCUCCCAC A UUAACACC | 387 | CCTCTTAA GGCTAGCTACAACGA CTCCCACC | 5184 |
| 1597 | CCACAUUA A CACCACUG | 388 | CACTCCTC GGCTAGCTACAACGA TAATCTCC | 5185 |
| 1602 | UUAACACC A CUCCCCUC | 389 | CACCCCAC GGCTAGCTACAACGA CCTCTTAA | 5186 |
| 1605 | ACACCACU G CCCUCAAC | 390 | CTTCACCC GGCTAGCTACAACGA ACTCCTCT | 5187 |
| 1612 | UCCCCUCA A CUCCAAUC | 391 | CATTCCAC GGCTAGCTACAACGA TCAGCCCA | 5188 |
| 1615 | CCUCAACU G CAAUCACU | 392 | ACTCATTC GGCTAGCTACAACGA ACTTCACC | 5189 |
| 1618 | CAACUCCA A UCACUCCC | 393 | CCCACTCA GGCTAGCTACAACGA TGCAGTTC | 5190 |
| 1621 | CUCCAAUC A CUCCCUCC | 394 | CCACCCAC GGCTAGCTACAACGA CATTCCAC | 5191 |
| 1632 | CCCUCCAA A CCCCGUUC | 395 | CAACCCGG GGCTAGCTACAACGA TTGGAGCC | 5192 |
| 1637 | CAAACCGG G UUCAUUGC | 396 | GCAATGAA GGCTAGCTACAACGA CCGGTTTG | 5193 |
| 1641 | CCGGGUUC A UUGCUGCA | 397 | TGCAGCAA GGCTAGCTACAACGA GAACCCGG | 5194 |
| 1644 | GGUUCAUU G CUGCACUG | 398 | CAGTGCAG GGCTAGCTACAACGA AATGAACC | 5195 |
| 1647 | UCAUUGCU G CACUGUUC | 399 | GAACAGTG GGCTAGCTACAACGA AGCAATGA | 5196 |
| 1649 | AUUGCUGC A CUGUUCUA | 400 | TAGAACAG GGCTAGCTACAACGA GCAGCAAT | 5197 |
| 1652 | GCUGCACU G UUCUAUGC | 401 | GCATAGAA GGCTAGCTACAACGA AGTGCAGC | 5198 |
| 1657 | ACUGUUCU A UGCACACA | 402 | TGTGTGCA GGCTAGCTACAACGA AGAACAGT | 5199 |
| 1659 | UGUUCUAU G CACACAGG | 403 | CCTGTGTG GGCTAGCTACAACGA ATAGAACA | 5200 |
| 1661 | UUCUAUGC A CACAGGUU | 404 | AACCTGTG GGCTAGCTACAACGA GCATAGAA | 5201 |
| 1663 | CUAUGCAC A CAGGUUCA | 405 | TGAACCTG GGCTAGCTACAACGA GTGCATAG | 5202 |
| 1667 | GCACACAG G UUCAACUC | 406 | GAGTTGAA GGCTAGCTACAACGA CTGTGTGC | 5203 |
| 1672 | CAGGUUCA A CUCGUCCG | 407 | CGGACGAG GGCTAGCTACAACGA TGAACCTG | 5204 |
| 1676 | UUCAACUC G UCCGGAUG | 408 | CATCCGGA GGCTAGCTACAACGA GAGTTGAA | 5205 |
| 1682 | UCGUCCGG A UGCCCACA | 409 | TGTGGGCA GGCTAGCTACAACGA CCGGACGA | 5206 |
| 1684 | GUCCGGAU G CCCACAGC | 410 | GCTGTGGG GGCTAGCTACAACGA ATCCGGAC | 5207 |
| 1688 | GGAUGCCC A CAGCGCUU | 411 | AAGCGCTG GGCTAGCTACAACGA GGGCATCC | 5208 |
| 1691 | UGCCCACA G CGCUUGGC | 412 | GCCAAGCG GGCTAGCTACAACGA TGTGGGCA | 5209 |
| 1693 | CCCACAGC G CUUGGCCA | 413 | TGGCCAAG GGCTAGCTACAACGA GCTGTGGG | 5210 |
| 1698 | AGCGCUUG G CCAGCUGC | 414 | GCAGCTGG GGCTAGCTACAACGA CAAGCGCT | 5211 |
| 1702 | CUUGGCGA G CUGCCGCU | 415 | AGCGGCAG GGCTAGCTACAACGA TGGCCAAG | 5212 |
| 1705 | GGCCAGCU G CCGCUCGA | 416 | TGGAGCGG GGCTAGCTACAACGA AGCTGGCC | 5213 |
| 1708 | CAGCUGCC G CUCCAUUG | 417 | CAATGGAG GGCTAGCTACAACGA GGCAGCTG | 5214 |
| 1713 | GCCGCUCC A UUGACAAG | 418 | CTTCTCAA GGCTAGCTACAACGA GGAGCGGC | 5215 |
| 1717 | CUCCAUUG A CAAGUUCG | 419 | CGAACTTC GGCTAGCTACAACGA CAATGGAG | 5216 |
| 1721 | AUUGACAA G UUCGCUCA | 420 | TCAGCGAA GGCTAGCTACAACGA TTGTCAAT | 5217 |
| 1725 | ACAAGUUC G CUCAGGGG | 421 | CCCCTGAG GGCTAGCTACAACGA GAACTTGT | 5218 |
| 1733 | GCUCAGGG G UGGGGUCC | 422 | GGACCCGA GGCTAGCTACAACGA CCCTGAGC | 5219 |
| 1738 | GGGGUGGG G UCCUAUCA | 423 | TGATAGGA GGCTAGCTACAACGA CCCACCCC | 5220 |
| 1743 | GGGGUCCU A UCACCUAC | 424 | GTAGGTGA GGCTAGCTACAACGA AGGACCCC | 5221 |
| 1746 | GUCCUAUC A CCUACACC | 425 | GGTGTAGG GGCTAGCTACAACGA GATAGGAC | 5222 |
| 1750 | UAUCACCU A CACCGAGG | 426 | CCTCGGTG GGCTAGCTACAACGA AGGTGATA | 5223 |
| 1752 | UCACCUAC A CCGAGGGC | 427 | GCCCTCGG GGCTAGCTACAACGA GTAGGTGA | 5224 |
| 1759 | CACCGAGG G CCACAACU | 428 | ACTTGTGG GGCTAGCTACAACGA CCTCGGTG | 5225 |
| 1762 | CGAGGGCC A CAACUCGG | 429 | CCGAGTTG GGCTAGCTACAACGA GGCCCTCG | 5226 |
| 1765 | GGGCCACA A CUCGGACC | 430 | GGTCCGAG GGCTAGCTACAACGA TGTGGCCC | 5227 |
| 1771 | CAACUCGG A CCAGAGGC | 431 | GCCTCTGG GGCTAGCTACAACGA CCGAGTTG | 5228 |
| 1778 | GACCAGAG G CCCUAUUG | 432 | CAATAGGG GGCTAGCTACAACGA CTCTGGTC | 5229 |
| 1783 | GAGGCCCU A UUGCUGGC | 433 | GCCAGCAA GGCTAGCTACAACGA AGGGCCTC | 5230 |
| 1786 | GCCCUAUU G CUGGCACU | 434 | AGTGCCAG GGCTAGCTACAACGA AATAGGGC | 5231 |
| 1790 | UAUUGCUG G CACUACGC | 435 | GCGTAGTG GGCTAGCTACAACGA CAGCAATA | 5232 |
| 1792 | UUGCUGGC A CUACGCAC | 436 | GTGCGTAG GGCTAGCTACAACGA GCCAGCAA | 5233 |
| 1795 | CUGGCACU A CGCACCGC | 437 | GCGGTGCG GGCTAGCTACAACGA AGTGCCAG | 5234 |
| 1797 | GGCACUAC G CACCGCGG | 438 | CCGCGGTG GGCTAGCTACAACGA GTAGTGCC | 5235 |
| 1799 | CACUACGC A CCGCGGCC | 439 | GGCCGCGG GGCTAGCTACAACGA GCGTAGTG | 5236 |
| 1802 | UACGCACC G CGGCCGUG | 440 | CACGGCCG GGCTAGCTACAACGA GGTGCGTA | 5237 |
| 1805 | GCACCGCG G CCGUGUGG | 441 | CCACACGG GGCTAGCTACAACGA CGCGGTGC | 5238 |
| 1808 | CCGCGGCC G UGUGGUAU | 442 | ATACCACA GGCTAGCTACAACGA GGCCGCGG | 5239 |
| 1810 | GCGGCCGU G UGGUAUCG | 443 | CGATACGA GGCTAGCTACAACGA ACGGCCGC | 5240 |
| 1813 | GCCGUGUG G UAUCGUAC | 444 | GTACGATA GGCTAGCTACAACGA CACACGGC | 5241 |
| 1815 | CGUGUGGU A UCGUACCC | 445 | GGGTACGA GGCTAGCTACAACGA ACCACACG | 5242 |
| 1818 | GUGGUAUC G UACCCGCA | 446 | TGCGGGTA GGCTAGCTACAACGA GATACCAC | 5243 |
| 1820 | GGUAUCGU A CCCGCAUC | 447 | GATGCGGG GGCTAGCTACAACGA ACGATACCC | 5244 |
| 1824 | UCGUACCC G CAUCGCAG | 448 | CTGCGATG GGCTAGCTACAACGA GGGTACGA | 5245 |
| 1826 | GUACCCGC A UCGCAGGU | 449 | ACCTGCGA GGCTAGCTACAACGA GCCGGTAC | 5246 |
| 1829 | CCCGCAUC G CAGGUAUG | 450 | CATACCTG GGCTAGCTACAACGA GATGCGGG | 5247 |
| 1833 | CAUCGCAG G UAUGUGGU | 451 | ACCACATA GGCTAGCTACAACGA CTGCGATG | 5248 |
| 1835 | UCGCAGGU A UGUGGUCC | 452 | GGACCACA GGCTAGCTACAACGA ACCTGCGA | 5249 |
| 1837 | GCAGGUAU G UGGUCCAG | 453 | CTGGACGA GGCTAGCTACAACGA ATACCTGC | 5250 |
| 1840 | GGUAUGUG G UCCAGUGU | 454 | ACACTGGA GGCTAGCTACAACGA CACATACC | 5251 |
| 1845 | GUGGUCGA G UGUAUUGC | 455 | GCAATACA GGCTAGCTACAACGA TGGACCAC | 5252 |
| 1847 | GGUCCAGU G UAUUGCUU | 456 | AAGCAATA GGCTAGCTACAACGA ACTGGACC | 5253 |
| 1849 | UCCAGUGU A UUGCUUCA | 457 | TGAAGCAA GGCTAGCTACAACGA ACACTGGA | 5254 |
| 1852 | AGUGUAUU G CUUCACCC | 458 | GGGTGAAG GGCTAGCTACAACGA AATACACT | 5255 |
| 1857 | AUUGCUUC A CCCCAAGC | 459 | GCTTGGGG GGCTAGCTACAACGA GAAGCAAT | 5256 |
| 1864 | CACCCCAA G CCCUGGUG | 460 | CAACAGGG GGCTAGCTACAACGA TTGGGGTG | 5257 |
| 1869 | CAAGCCCU G UUGUGGUG | 461 | CACCACAA GGCTAGCTACAACGA AGGGCTTG | 5258 |
| 1872 | GCCCUGUU G UGGUGGGG | 462 | CCCCACGA GGCTAGCTACAACGA AACAGGGC | 5259 |
| 1875 | CUGGUGUG G UGGGGACG | 463 | CGTCCCGA GGCTAGCTACAACGA CACAACAG | 5260 |
| 1881 | UGGUGGGG A CGACCGAC | 464 | GTCGGTCG GGCTAGCTACAACGA CCCCACCA | 5261 |
| 1884 | UGGGGACG A CCGACCGU | 465 | ACGGTCGG GGCTAGCTACAACGA CGTCCCCA | 5262 |
| 1888 | GACGACCG A CCGUUUCG | 466 | CGAAACGG GGCTAGCTACAACGA CGGTCGTC | 5263 |
| 1891 | GACCGACC G UUUCGGCG | 467 | CGCCGAAA GGCTAGCTACAACGA GGTCGGTC | 5264 |
| 1897 | CCGUUUCG G CGCCCCCA | 468 | TGGGGGCG GGCTAGCTACAACGA CGAAACGG | 5265 |
| 1899 | GUUUCGGC G CCCCCACG | 469 | CGTGGGGG GGCTAGCTACAACGA GCCGAAAC | 5266 |
| 1905 | GCGCCCCC A CGUAUAAC | 470 | GTTATACG GGCTAGCTACAACGA GGGGGCGC | 5267 |
| 1907 | GCCCCCAC G UAUAACUG | 471 | CAGTTATA GGCTAGCTACAACGA GTGGGGGC | 5268 |
| 1909 | CCCCACGU A UAACUGGG | 472 | CCCAGTTA GGCTAGCTACAACGA ACGTGGGG | 5269 |
| 1912 | CACGUAUA A CUGCGGGG | 473 | CCCCCCAG GGCTAGCTACAACGA TATACGTG | 5270 |
| 1920 | ACUGGGGG G CGAACGAG | 474 | CTCGTTCG GGCTAGCTACAACGA CCCCCAGT | 5271 |
| 1924 | GGGGGCCA A CGAGACGG | 475 | CCGTCTCG GGCTAGCTACAACGA TCGCCCCC | 5272 |
| 1929 | CGAACGAG A CGGACGUG | 476 | CACGTCCG GGCTAGCTACAACGA CTCGTTCG | 5273 |
| 1933 | CGAGACGG A CGUGCUGC | 477 | GCAGCACG GGCTAGCTACAACGA CCGTCTCG | 5274 |
| 1935 | AGACGGAC G UGCUGCUC | 478 | GACCACGA GGCTAGCTACAACGA GTCCGTCT | 5275 |
| 1937 | ACGGACGU G CUCCUCCU | 479 | ACGAGCAG GGCTAGCTACAACGA ACGTCCCT | 5276 |
| 1940 | CACGUGCU G CUCCUCAA | 480 | TTGAGGAC GGCTAGCTACAACGA ACCACCTC | 5277 |
| 1948 | GCUCCUCA A CAACACGC | 481 | GCGTGTTG GGCTAGCTACAACGA TGACCACC | 5278 |
| 1951 | CCUCAACA A CACGCGGC | 482 | CCCCCGTC GGCTAGCTACAACGA TGTTGAGG | 5279 |
| 1953 | UCAACAAC A CCCCGCCC | 483 | CGGCCGCG GGCTAGCTACAACGA CTTGTTCA | 5280 |
| 1955 | AACAACAC G CCCCCGCC | 484 | GCCGGCCC GGCTAGCTACAACGA GTCTTCTT | 5281 |
| 1958 | AACACCCG G CCCCCCGA | 485 | TGCGGCCC GGCTAGCTACAACGA CGCGTGTT | 5282 |
| 1961 | ACGCCCCC G CCGCAAGG | 486 | CCTTCCCC GGCTAGCTACAACGA CGCCCCCT | 5283 |
| 1964 | CGGCCGCC G CAAGGCAA | 487 | TTCCCTTC GGCTAGCTACAACGA CGCCCCCC | 5284 |
| 1969 | GCCGCAAC G CAACUGGU | 488 | ACCACTTC GGCTAGCTACAACGA CTTCCCCC | 5285 |
| 1972 | GCAAGCCA A CUGGUUCG | 489 | CCAACCAG GGCTAGCTACAACGA TCCCTTCC | 5286 |
| 1976 | GGCAACUG G UUCGGCUG | 490 | CAGCCGAA GGCTAGCTACAACGA CACTTCCC | 5287 |
| 1981 | CUGGUUCG G CUCCACAU | 491 | ATGTGCAG GGCTAGCTACAACGA CGAACCAG | 5288 |
| 1984 | GUUCGGCU G CACAUCCA | 492 | TCCATCTC GGCTAGCTACAACGA AGCCGAAC | 5289 |
| 1986 | UCCCCUCC A CAUCCAUC | 493 | CATCCATC GGCTAGCTACAACGA CCACCCCA | 5290 |
| 1988 | CCCUCCAC A UGGAUGAA | 494 | TTCATCGA GGCTAGCTACAACGA CTCCACCC | 5291 |
| 1992 | GCACAUCG A UGAAUGGC | 495 | CCCATTCA GGCTAGCTACAACGA CCATCTCC | 5292 |
| 1996 | AUCCAUCA A UCCCACUC | 496 | CACTCCGA GGCTAGCTACAACGA TCATCCAT | 5293 |
| 1999 | CAUCAAUC G CACUGCCU | 497 | ACCCACTC GGCTAGCTACAACGA CATTCATC | 5294 |
| 2001 | UCAAUCCC A CUCCCUUC | 498 | GAACCCAC GGCTAGCTACAACGA CCCATTCA | 5295 |
| 2006 | CCCACUCC G UUCACCAA | 499 | TTCCTCAA GGCTAGCTACAACGA CCACTCCC | 5296 |
| 2010 | CUCCCUUC A CCAACACC | 500 | CCTCTTCC GGCTAGCTACAACGA CAACCCAC | 5297 |
| 2016 | UCACCAAG A CCUCCGGG | 501 | CCCCCACC GGCTAGCTACAACGA CTTCCTCA | 5298 |
| 2018 | ACCAACAC G UGCGGGGG | 502 | CCCCCCGA GGCTAGCTACAACGA CTCTTCCT | 5299 |
| 2020 | CAACACGU G CCGGGGCC | 503 | CGCCCCCG GGCTAGCTACAACGA ACCTCTTG | 5300 |
| 2026 | CUCCCCCC G CCCCCCGU | 504 | ACCGCCCG GGCTAGCTACAACGA CCCCCCAC | 5301 |
| 2033 | CGCCCCCC G UCCAACAU | 505 | ATCTTCGA GGCTAGCTACAACGA GGGGGGCC | 5302 |
| 2035 | CCCCCCGU G CAACAUCG | 506 | CCATCTTC GGCTAGCTACAACGA ACGCCCCC | 5303 |
| 2038 | CCCCUGCA A CAUGGGGG | 507 | CCCCCATC GGCTAGCTACAACGA TCCACCCC | 5304 |
| 2040 | CGUGCAAC A UCGGGGGG | 508 | CCCCCCGA GGCTAGCTACAACGA CTTCCACC | 5305 |
| 2049 | UCGGGGGG G CCGGUAAC | 509 | CTTACCCC GGCTAGCTACAACGA CCCCCCGA | 5306 |
| 2053 | GGGGGCCG G UAACGACA | 510 | TGTCGTTA GGCTAGCTACAACGA CGGCCCCC | 5307 |
| 2058 | GGCCGGUA A CGACACCU | 511 | AGGTGTCG GGCTAGCTACAACGA TACCGGCC | 5308 |
| 2059 | CGGUAACG A CACCUUAA | 512 | TTAAGGTG GGCTAGCTACAACGA CGTTACCG | 5309 |
| 2061 | GUAACGAC A CCUUAACC | 513 | GGTTAAGG GGCTAGCTACAACGA GTCGTTAC | 5310 |
| 2067 | ACACCUUA A CCUGCCCC | 514 | GGGGCAGG GGCTAGCTACAACGA TAAGGTGT | 5311 |
| 2071 | CUUAACCU G CCCCACGG | 515 | CCGTGGGG GGCTAGCTACAACGA AGGTTAAG | 5312 |
| 2076 | CCUGCCCC A CGGACUGC | 516 | GCAGTCCG GGCTAGCTACAACGA GGGGCAGG | 5313 |
| 2080 | CCCCACGG A CUGCUUCC | 517 | GGAAGCAG GGCTAGCTACAACGA CCGTGGGG | 5314 |
| 2083 | CACGGACU G CUUCCGGA | 518 | TCCGGAAG GGCTAGCTACAACGA AGTCCCCG | 5315 |
| 2093 | UUCCGGAA G CACCCCGA | 519 | TCGGGGTG GGCTAGCTACAACGA TTCCGGAA | 5316 |
| 2095 | CCGGAAGC A CCCCGAGG | 520 | CCTCGGGG GGCTAGCTACAACGA GCTTCCGG | 5317 |
| 2103 | ACCCCGAG G CCACUUAC | 521 | GTAAGTGG GGCTAGCTACAACGA CTCGGGGT | 5318 |
| 2106 | CCGAGGCC A CUUACGCA | 522 | TGCGTAAG GGCTAGCTACAACGA GGCCTCGG | 5319 |
| 2110 | GGCCACUU A CGCAAAGU | 523 | ACTTTGCG GGCTAGCTACAACGA AAGTGGCC | 5320 |
| 2112 | CCACUUAC G CAAAGUGC | 524 | GCACTTTG GGCTAGCTACAACGA GTAAGTGG | 5321 |
| 2117 | UACGCAAA G UGCGGUUC | 525 | GAACCGCA GGCTAGCTACAACGA TTTGCGTA | 5322 |
| 2119 | CGCAAAGU G CGGUUCGG | 526 | CCGAACCG GGCTAGCTACAACGA ACTTTGCG | 5323 |
| 2122 | AAAGUGCG G UUCGGGGC | 527 | GCCCCGAA GGCTAGCTACAACGA CGCACTTT | 5324 |
| 2129 | GGUUCGGG G CCUUGGUU | 528 | AACCAAGG GGCTAGCTACAACGA CCCGAACC | 5325 |
| 2135 | CGGCCUUG G UUAACACC | 529 | GGTGTTAA GGCTAGCTACAACGA CAAGGCCC | 5326 |
| 2139 | CUUGGUUA A CACCUAGA | 530 | TCTAGGTG GGCTAGCTACAACGA TAACCAAG | 5327 |
| 2141 | UGGUUAAC A CCUAGAUG | 531 | CATCTAGG GGCTAGCTACAACGA GTTAACCA | 5328 |
| 2147 | ACACCUAG A UGCAUAGU | 532 | ACTATGCA GGCTAGCTACAACGA CTAGGTGT | 5329 |
| 2149 | ACCUAGAU G CAUAGUUG | 533 | CAACTATG GGCTAGCTACAACGA ATCTAGGT | 5330 |
| 2151 | CUAGAUGC A UAGUUGAC | 534 | GTCAACTA GGCTAGCTACAACGA GCATCTAG | 5331 |
| 2154 | GAUGCAUA G UUGACUAC | 535 | GTAGTCAA GGCTAGCTACAACGA TATGCATC | 5332 |
| 2158 | CAUAGUUG A CUACCCAU | 536 | ATGGGTAG GGCTAGCTACAACGA CAACTATG | 5333 |
| 2161 | AGUUGACU A CCCAUACA | 537 | TGTATGGG GGCTAGCTACAACGA AGTCAACT | 5334 |
| 2165 | GACUACCC A UACAGGCU | 538 | AGCCTGTA GGCTAGCTACAACGA GGGTAGTC | 5335 |
| 2167 | CUACCCAU A CAGGCUUU | 539 | AAAGCCTG GGCTAGCTACAACGA ATGGGTAG | 5336 |
| 2171 | CCAUACAG G CUUUGGCA | 540 | TGCCAAAG GGCTAGCTACAACGA CTGTATGG | 5337 |
| 2177 | AGGCUUUG G CACUACCC | 541 | GGGTAGTG GGCTAGCTACAACGA CAAAGCCT | 5338 |
| 2179 | GCUUUGGC A CUACCCCU | 542 | AGGGGTAG GGCTAGCTACAACGA GCCAAAGC | 5339 |
| 2182 | UUGGCACU A CCCCUGCA | 543 | TGCAGGGG GGCTAGCTACAACGA AGTGCCAA | 5340 |
| 2188 | CUACCCCU G CACUGUCA | 544 | TGACAGTG GGCTAGCTACAACGA AGGGGTAG | 5341 |
| 2190 | ACCCCUGC A CUGUCAAU | 545 | ATTGACAG GGCTAGCTACAACGA GCAGGGGT | 5342 |
| 2193 | CCUGCACU G UCAAUUUU | 546 | AAAATTGA GGCTAGCTACAACGA AGTGCAGG | 5343 |
| 2197 | CACUGUCA A UUUUUCCA | 547 | TGGAAAAA GGCTAGCTACAACGA TGACAGTG | 5344 |
| 2205 | AUUUUUCC A UCUUUAAG | 548 | CTTAAAGA GGCTAGCTACAACGA GGAAAAAT | 5345 |
| 2214 | UCUUUAAG G UUAGGAUG | 549 | CATCCTAA GGCTAGCTACAACGA CTTAAAGA | 5346 |
| 2220 | AGGUUAGG A UGUAUGUG | 550 | CACATACA GGCTAGCTACAACGA CCTAACCT | 5347 |
| 2222 | GUUAGGAU G UAUGUGGG | 551 | CCCACATA GGCTAGCTACAACGA ATCCTAAC | 5348 |
| 2224 | UAGGAUGU A UGUGGGGG | 552 | CCCCCACA GGCTAGCTACAACGA ACATCCTA | 5349 |
| 2226 | GGAUGUAU G UGGGGGGC | 553 | GCCCCCGA GGCTAGCTACAACGA ATACATCC | 5350 |
| 2233 | UGUGGGGG G CGUGGAGC | 554 | GGCTCCACG GGCTAGCTACAACGA CCCCCACA | 5351 |
| 2235 | UGGGGGGC G UGGACCAC | 555 | GTGCTCGA GGCTAGCTACAACGA GCCCCCCA | 5352 |
| 2240 | GGCGUGGA G CACAGGCU | 556 | AGCCTGTG GGCTAGCTACAACGA TCCACGCC | 5353 |
| 2242 | CGUGGAGC A CAGGCUCA | 557 | TGAGCCTG GGCTAGCTACAACGA GCTCCACG | 5354 |
| 2246 | GAGCACAG G CUCACCGC | 558 | GCGGTGAG GGCTAGCTACAACGA CTGTGCTC | 5355 |
| 2250 | ACAGGCUC A CCGCCGCA | 559 | TGCGGCGG GGCTAGCTACAACGA GAGCCTGT | 5356 |
| 2253 | GGCUCACC G CCGCAUGC | 560 | GCATGCGG GGCTAGCTACAACGA GGTGAGCC | 5357 |
| 2256 | UCACCGCC G CAUGCAAU | 561 | ATTGCATG GGCTAGCTACAACGA GGCGGTGA | 5358 |
| 2258 | ACCGCCGC A UGCAAUUG | 562 | CAATTGCA GGCTAGCTACAACGA GCGGCGGT | 5359 |
| 2260 | CGCCGCAU G CAAUUGGA | 563 | TCCAATTG GGCTAGCTACAACGA ATGCGGCG | 5360 |
| 2263 | CGCAUGCA A UUGGACUC | 564 | GAGTCCAA GGCTAGCTACAACGA TGCATGCG | 5361 |
| 2268 | GCAAUUGG A CUCGAGGA | 565 | TCCTCGAG GGCTAGCTACAACGA CCAATTGC | 5362 |
| 2279 | CGAGGAGA G CGUUGUGA | 566 | TCACAACG GGCTAGCTACAACGA TCTCCTCG | 5363 |
| 2281 | AGGAGAGC G UUGUGAUU | 567 | AATCACAA GGCTAGCTACAACGA GCTCTCCT | 5364 |
| 2284 | AGAGCGUU G UGAUUUGG | 568 | CCAAATCA GGCTAGCTACAACGA AACGCTCT | 5365 |
| 2287 | GCGUUGUG A UUUGGAGG | 569 | CCTCCAAA GGCTAGCTACAACGA CACAACGC | 5366 |
| 2296 | UUUGGAGG A CAGGGACA | 570 | TGTCCCTG GGCTAGCTACAACGA CCTCCAAA | 5367 |
| 2302 | GGACAGGG A CAGAUCAG | 571 | CTGATCTG GGCTAGCTACAACGA CCCTGTCC | 5368 |
| 2306 | AGGGACAG A UCAGAGCU | 572 | AGCTCTGA GGCTAGCTACAACGA CTGTCCCT | 5369 |
| 2312 | AGAUCAGA G CUCAGCCC | 573 | GGGCTGAG GGCTAGCTACAACGA TCTGATCT | 5370 |
| 2317 | AGAGCUCA G CCCGCUGC | 574 | GCAGCGGG GGCTAGCTACAACGA TGAGCTCT | 5371 |
| 2321 | CUCAGCCC G CUGCUGUU | 575 | AACAGCAG GGCTAGCTACAACGA GGGCTGAG | 5372 |
| 2324 | AGCCCGCU G CUGUUGUC | 576 | GACAACAG GGCTAGCTACAACGA AGCGGGCT | 5373 |
| 2327 | CCGCUGCU G UUGUCCAC | 577 | GTGGACAA GGCTAGCTACAACGA AGCAGCGG | 5374 |
| 2330 | CUGCUGUU G UCCACUAC | 578 | GTAGTGGA GGCTAGCTACAACGA AACAGCAG | 5375 |
| 2334 | UGUUGUCC A CUACAGAG | 579 | CTCTGTAG GGCTAGCTACAACGA GGACAACA | 5376 |
| 2337 | UGUCCACU A CAGAGUGG | 580 | CCACTCTG GGCTAGCTACAACGA AGTGGACA | 5377 |
| 2342 | ACUACAGA G UGGCAAAU | 581 | ATTTGCGA GGCTAGCTACAACGA TCTGTAGT | 5378 |
| 2345 | ACAGAGUG G CAAAUACU | 582 | AGTATTTG GGCTAGCTACAACGA CACTCTGT | 5379 |
| 2349 | AGUGGCAA A UACUGCCC | 583 | GGGCAGTA GGCTAGCTACAACGA TTGCCACT | 5380 |
| 2351 | UGGCAAAU A CUGCCCUG | 584 | CAGGGCAG GGCTAGCTACAACGA ATTTGCCA | 5381 |
| 2354 | CAAAUACU G CCCUGCUC | 585 | GAGCAGGG GGCTAGCTACAACGA AGTATTTG | 5382 |
| 2359 | ACUGCCCU G CUCCUUCA | 586 | TGAAGGAG GGCTAGCTACAACGA AGGGCAGT | 5383 |
| 2367 | GCUCCUUC A CCACCCUA | 587 | TAGGGTGG GGCTAGCTACAACGA GAAGGAGC | 5384 |
| 2370 | CCUUCACC A CCCUACCG | 588 | CGGTAGGG GGCTAGCTACAACGA GGTGAAGG | 5385 |
| 2375 | ACCACCCU A CCGGCUCU | 589 | AGAGCCGG GGCTAGCTACAACGA AGGGTGGT | 5386 |
| 2379 | CCCUACCG G CUCUGUCC | 590 | GGACAGAG GGCTAGCTACAACGA CGGTAGGG | 5387 |
| 2384 | CCGGCUCU G UCCACUGG | 591 | CCAGTGGA GGCTAGCTACAACGA AGAGCCGG | 5388 |
| 2388 | CUCUGUCC A CUGGUUUG | 592 | CAAACCAG GGCTAGCTACAACGA GGACAGAG | 5389 |
| 2392 | GUCCACUG G UUUGAUCC | 593 | GGATCAAA GGCTAGCTACAACGA CAGTGGAC | 5390 |
| 2397 | CUGGUUUG A UCCAUCUC | 594 | GAGATGGA GGCTAGCTACAACGA CAAACCAG | 5391 |
| 2401 | UUUGAUCC A UCUCCACC | 595 | GGTGGAGA GGCTAGCTACAACGA GGATCAAA | 5392 |
| 2407 | CCAUCUCC A CCAGAACA | 596 | TGTTCTGG GGCTAGCTACAACGA GGAGATGG | 5393 |
| 2413 | CCACCAGA A CAUCGUGG | 597 | CCACGATG GGCTAGCTACAACGA TCTGGTGG | 5394 |
| 2415 | ACCAGAAC A UCGUGGAC | 598 | GTCCACGA GGCTAGCTACAACGA GTTCTGGT | 5395 |
| 2418 | AGAACAUC G UGGACCUG | 599 | CACGTCGA GGCTAGCTACAACGA GATGTTCT | 5396 |
| 2422 | CAUCGUGG A CGUGCAAU | 600 | ATTGCACG GGCTAGCTACAACGA CCACGATG | 5397 |
| 2424 | UCGUGGAC G UGCAAUAC | 601 | GTATTGCA GGCTAGCTACAACGA GTCCACGA | 5398 |
| 2426 | GUGGACGU G CAAUACCU | 602 | AGGTATTG GGCTAGCTACAACGA ACGTCCAC | 5399 |
| 2429 | GACGUGCA A UACCUGUA | 603 | TACAGGTA GGCTAGCTACAACGA TGCACGTC | 5400 |
| 2431 | CGUGCAAU A CCUGUACG | 604 | CGTACAGG GGCTAGCTACAACGA ATTGCACG | 5401 |
| 2435 | CAAUACCU G UACGGUGU | 605 | ACACCGTA GGCTAGCTACAACGA AGGTATTG | 5402 |
| 2437 | AUACCUGU A CGGUGUAG | 606 | CTACACCG GGCTAGCTACAACGA ACAGGTAT | 5403 |
| 2440 | CCUGUACG G UGUAGGGU | 607 | ACCCTACA GGCTAGCTACAACGA CGTACAGG | 5404 |
| 2442 | UGUACGGU G UAGGGUCA | 608 | TGACCCTA GGCTAGCTACAACGA ACCGTACA | 5405 |
| 2447 | GGUGUAGG G UCAGCGGU | 609 | ACCGCTGA GGCTAGCTACAACGA CCTACACC | 5406 |
| 2451 | UAGGGUCA G CGGUUGUC | 610 | GACAACCG GGCTAGCTACAACGA TGACCCTA | 5407 |
| 2454 | GGUCAGCG G UUGUCUCC | 611 | GGAGACAA GGCTAGCTACAACGA CGCTGACC | 5408 |
| 2457 | CAGCGGUU G UCUCCUUC | 612 | GAAGGAGA GGCTAGCTACAACGA AACCGCTG | 5409 |
| 2466 | UCUCCUUC G CAAUCAAA | 613 | TTTGATTG GGCTAGCTACAACGA GAAGGAGA | 5410 |
| 2469 | CCUUCGCA A UCAAAUGG | 614 | CCATTTGA GGCTAGCTACAACGA TGCGAAGG | 5411 |
| 2474 | GCAAUCAA A UGGGAGUA | 615 | TACTCCGA GGCTAGCTACAACGA TTGATTGC | 5412 |
| 2480 | AAAUGGGA G UAUGUCCU | 616 | AGGACATA GGCTAGCTACAACGA TCCCATTT | 5413 |
| 2482 | AUGGGAGU A UGUCCUGU | 617 | ACAGGACA GGCTAGCTACAACGA ACTCCCAT | 5414 |
| 2484 | GGGAGUAU G UCCUGUUG | 618 | CAACAGGA GGCTAGCTACAACGA ATACTCCC | 5415 |
| 2489 | UAUGUCCU G UUGCUUUU | 619 | AAAAGCAA GGCTAGCTACAACGA AGGACATA | 5416 |
| 2492 | GUCCUGUU G CUUUUCCU | 620 | AGGAAAAG GGCTAGCTACAACGA AACAGGAC | 5417 |
| 2508 | UUCUCCUG G CAGACGCG | 621 | CGCGTCTG GGCTAGCTACAACGA CAGGAGAA | 5418 |
| 2512 | CCUGGCAG A CGCGCGCG | 622 | CGCGCGCG GGCTAGCTACAACGA CTGCCAGG | 5419 |
| 2514 | UGGCAGAC G CGCGCGUC | 623 | GACGCGCG GGCTAGCTACAACGA GTCTGCCA | 5420 |
| 2516 | GCAGACGC G CGCGUCUG | 624C | AGACGCG GGCTAGCTACAACGA GCGTCTGC | 5421 |
| 2518 | AGACGCGC G CGUCUGUG | 625 | CACAGACG GGCTAGCTACAACGA GCGCGTCT | 5422 |
| 2520 | ACGCGCGC G UCUGUGCC | 626 | GGCACAGA GGCTAGCTACAACGA GCGCGCGT | 5423 |
| 2524 | GCGCGUCU G UGCCUGUU | 627 | AACAGGCA GGCTAGCTACAACGA AGACGCGC | 5424 |
| 2526 | GCGUCUGU G CCUGUUUG | 628 | CAAACAGG GGCTAGCTACAACGA ACAGACGC | 5425 |
| 2530 | CUGUGCCU G UUUGUGGA | 629 | TCCACAAA GGCTAGCTACAACGA AGGCACAG | 5426 |
| 2534 | GCCUGUUU G UGGAUGAU | 630 | ATCATCGA GGCTAGCTACAACGA AAACAGGC | 5427 |
| 2538 | GUUUGUGG A UGAUGCUG | 631 | CAGCATCA GGCTAGCTACAACGA CCACAAAC | 5428 |
| 2541 | UGUGGAUG A UGCUGUUG | 632 | CAACAGCA GGCTAGCTACAACGA CATCCACA | 5429 |
| 2543 | UGGAUGAU G CUGUUGGU | 633 | ACCAACAG GGCTAGCTACAACGA ATCATCCA | 5430 |
| 2546 | AUGAUGCU G UUGGUAGC | 634 | GCTACCAA GGCTAGCTACAACGA AGCATCAT | 5431 |
| 2550 | UGCUGUUG G UAGCCCAG | 635 | CTGGGCTA GGCTAGCTACAACGA CAACAGCA | 5432 |
| 2553 | UGUUGGUA G CCCAGGCC | 636 | GGCCTGGG GGCTAGCTACAACGA TACCAACA | 5433 |
| 2559 | UAGCCCAG G CCGAGGCU | 637 | AGCCTCGG GGCTAGCTACAACGA CTGGGCTA | 5434 |
| 2565 | AGGCCGAG G CUGCCCUA | 638 | TAGGGCAG GGCTAGCTACAACGA CTCGGCCT | 5435 |
| 2568 | CCGAGGCU G CCCUAGAG | 639 | CTCTAGGG GGCTAGCTAGAACGA AGCCTCGG | 5436 |
| 2578 | CCUAGAGA A CCUGGUGG | 640 | CCACCAGG GGCTAGCTACAACGA TCTCTAGG | 5437 |
| 2583 | AGAACCUG G UGGUCCUC | 641 | GAGGACGA GGCTAGCTACAACGA CAGGTTCT | 5438 |
| 2586 | ACCUGGUG G UCCUCAAU | 642 | ATTGAGGA GGCTAGCTACAACGA CACCAGGT | 5439 |
| 2593 | GGUCCUCA A UGCAGCAU | 643 | ATGCTGCA GGCTAGCTACAACGA TGAGGACC | 5440 |
| 2595 | UCCUCAAU G CAGCAUCC | 644 | GGATGCTG GGCTAGCTACAACGA ATTGAGGA | 5441 |
| 2598 | UCAAUGCA G CAUCCUUG | 645 | CAAGGATG GGCTAGCTACAACGA TGCATTGA | 5442 |
| 2600 | AAUGCAGC A UCCUUGGC | 646 | GCCAAGGA GGCTAGCTACAACGA GCTGCATT | 5443 |
| 2607 | CAUCCUUG G CCGGAGUG | 647 | CACTCCGG GGCTAGCTACAACGA CAAGGATG | 5444 |
| 2613 | UGGCCGGA G UGCAUGGC | 648 | GCCATUCA GGCTAUCTACAACGA TCCUGCCA | 5445 |
| 2615 | UCCGUAGU G CAUUGCAU | 649 | ATUCCATG GGCTAUCTACAACGA ACTCCGUC | 5446 |
| 2617 | CGGAGUGC A UUGCAUCC | 650 | GGATGCGA UGCTAGCTACAACGA GCACTCCG | 5447 |
| 2620 | AGUGCAUG G CAUCCUCU | 651 | AGAGGATG GGCTAGCTACAACGA CATGCACT | 5448 |
| 2622 | UGCAUGGC A UCCUCUCC | 652 | GGAGAGGA GGCTAUCTACAACGA GCCATGCA | 5449 |
| 2637 | CCUUCCUC G UGUUCUUC | 653 | GAAGAACA GGCTAGCTACAACGA GAGGAAGG | 5450 |
| 2639 | UUCCUCGU G UUCUUCUG | 654 | CAGAAGAA GGCTAGCTACAACGA ACGAGGAA | 5451 |
| 2647 | GUUCUUCU G UGCUGCCU | 655 | AGGCAGCA GGCTAGCTACAACGA AGAAGAAC | 5452 |
| 2649 | UCUUCUGU G CUGCCUGG | 656 | CCAGGCAG GGCTAGCTACAACGA ACAGAAGA | 5453 |
| 2652 | UCUGUGCU G CCUGGUAC | 657 | GTACCAGG GGCTAGCTACAACGA AGCACAGA | 5454 |
| 2657 | GCUGCCUG G UACAUCAA | 658 | TTGATGTA GGCTAGCTACAACGA CAGGCAGC | 5455 |
| 2659 | UGCCUGGU A CAUCAAAG | 659 | CTTTGATG GGCTAGCTACAACGA ACCAGGCA | 5456 |
| 2661 | CCUGGUAC A UCAAAGGC | 660 | GCCTTTGA GGCTAGCTACAACGA GTACCAGG | 5457 |
| 2668 | CAUCAAAG G CAAGCUGG | 661 | CCAGCTTG GGCTAGCTACAACGA CTTTGATG | 5458 |
| 2672 | AAAGGCAA G CUGGUCCC | 662 | GGGACCAG GGCTAGCTACAACGA TTGCCTTT | 5459 |
| 2676 | GCAAGCUG G UCCCUGGC | 663 | CCCAGGGA GGCTAGCTACAACGA CAGCTTGC | 5460 |
| 2685 | UCCCUGGG G CGGCAUAU | 664 | ATATUCCG GGCTAGCTACAACGA CCCAGGGA | 5461 |
| 2688 | CUUUGGCG G CAUAUGCU | 665 | AGCATATG GGCTAGCTACAACGA CGCCCCAU | 5462 |
| 2690 | GGGGCGGC A UAUUCUCU | 666 | AGAUCATA GGCTAGCTACAACGA GCCGCCCC | 5463 |
| 2692 | UUCUGCAU A UUCUCUCU | 667 | AGAGAUCA GGCTAGCTACAACGA ATGCCGCC | 5464 |
| 2694 | CUUCAUAU G CUCUCUAC | 668 | GTAGAGAG GGCTAUCTACAACGA ATATUCCG | 5465 |
| 2701 | UGCUCUCU A CUUCUUAU | 669 | ATACGCCG GGCTAGCTACAACGA AGAGAUCA | 5466 |
| 2704 | UCUCUACG G CUUAUGGC | 670 | GCCATACG GGCTAGCTACAACGA CUTAGAGA | 5467 |
| 2706 | UCUACGGC G UAUGGCCG | 671 | CGGCCATA GGCTAGCTACAACGA UCCUTAGA | 5468 |
| 2708 | UACGUCGU A UUUCCGCU | 672 | AGTAGCGG GGCTAGCTACAACGA ACUCCUTA | 5469 |
| 2711 | GUCUUAUU G CCGCUACU | 673 | AGTAGCGG GGCTAGCTACAACGA CATACGCC | 5470 |
| 2714 | UUAUUUCC G CUACUCCU | 674 | AGGAGTAG GGCTAGCTACAACGA GUCCATAC | 5471 |
| 2717 | UUUCCGCU A CUCCUGCU | 675 | AGCAGGAG GGCTAGCTACAACGA AGCGGCCA | 5472 |
| 2723 | CUACUCCU G CUCCUGCU | 676 | AGCAGGAG GGCTAGCTACAACGA AGGAUTAG | 5473 |
| 2729 | CUGCUCCU G CUGGCGUU | 677 | AACGCCAG GGCTAGCTACAACGA AUGAUCAG | 5474 |
| 2733 | UCCUGCUG G CGUUACCA | 678 | TGGTAACG GGCTAGCTACAACGA CAUCAGGA | 5475 |
| 2735 | CUUCUGUC G UUACCACC | 679 | GGTGGTAA GGCTAGCTACAACGA UCCAUCAG | 5476 |
| 2738 | CUGGCGUU A CCACCACG | 680 | CGTGGTGG GGCTAGCTACAACGA AACGCCAG | 5477 |
| 2741 | GCGUUACC A CCACGGGC | 681 | GCCCGTGG GGCTAGCTACAACGA GGTAACGC | 5478 |
| 2744 | UUACCACC A CGGGCGUA | 682 | TACGCCCG GGCTAGCTACAACGA GGTGGTAA | 5479 |
| 2748 | CACCACGG G CGUACGCC | 683 | GGCGTACG GGCTAGCTACAACGA CCGTGGTG | 5480 |
| 2750 | CCACGGGC G UACGCCAU | 684 | ATGGCGTA GGCTAGCTACAACGA GCCCGTGG | 5481 |
| 2752 | ACGGGCGU A CGCCAUGG | 685 | CCATCCCC GGCTAGCTACAACGA ACCCCCGT | 5482 |
| 2754 | GGGCGUAC G CCAUGGAC | 686 | GTCCATGG GGCTAGCTACAACGA GTACGCCC | 5483 |
| 2757 | CGUACGCC A UGGACCGG | 687 | CCGGTCGA GGCTAGCTACAACGA GGCGTACG | 5484 |
| 2761 | CGCCAUCC A CCGGGAGA | 688 | TCTCCCGG GGCTAGCTACAACGA CCATGGCG | 5485 |
| 2769 | ACCGGGAG A UGGCCGCA | 689 | TGCGGCGA GGCTAGCTACAACGA CTCCCGGT | 5486 |
| 2772 | GGGAGAUG G CCGCAUCG | 690 | CGATGCGG GGCTAGCTACAACGA CATCTCCC | 5487 |
| 2775 | AGAUGGCC G CAUCGUGC | 691 | GCACGATG GGCTAGCTACAACGA GGCCATCT | 5488 |
| 2777 | AUGGCCGC A UCGUGCGG | 692 | CCGCACGA GGCTAGCTACAACGA GCGGCCAT | 5489 |
| 2780 | GCCGCAUC G UGCGCACC | 693 | CCTCCCGA GGCTAGCTACAACGA GATGCGGC | 5490 |
| 2782 | CGCAUCCU G CGGAGCCC | 694 | CCCCTCCG GGCTAGCTACAACGA ACGATGCG | 5491 |
| 2788 | GUGCGGAG G CGUGCUUU | 695 | AAACCACG GGCTAGCTACAACGA CTCCGCAC | 5492 |
| 2790 | GCGGAGGC G UGGUUUUU | 696 | AAAAACGA GGCTAGCTACAACGA GCCTCCGC | 5493 |
| 2793 | GAGGCGUG G UUUUUGUA | 697 | TACAAAAA GGCTAGCTACAACGA CACGCCTC | 5494 |
| 2799 | UGCUUUUU G UACGUCUA | 698 | TAGACCTA GGCTAGCTACAACGA AAAAACCA | 5495 |
| 2803 | UUUUGUAG G UCUACCAC | 699 | CTCCTACA GGCTAGCTACAACGA CTACAAAA | 5496 |
| 2808 | UAGGUCUA G CACUCUUG | 700 | CAAGAGTC GGCTAGCTACAACGA TAGACCTA | 5497 |
| 2810 | GCUCUAGC A CUCUUCAC | 701 | GTCAAGAG GGCTAGCTACAACGA GCTAGACC | 5498 |
| 2817 | CACUCUUG A CCUUCUCA | 702 | TCACAACC GGCTAGCTACAACGA CAAGACTC | 5499 |
| 2822 | UUGACCUU G UCACCAUA | 703 | TATCCTCA GGCTAGCTACAACGA AAGCTCAA | 5500 |
| 2825 | ACCUUGUC A CCAUACUA | 704 | TAGTATCG GGCTAGCTACAACGA GACAACCT | 5501 |
| 2828 | UUGUCACC A UACUACAA | 705 | TTGTACTA GGCTAGCTACAACGA CGTCACAA | 5502 |
| 2830 | CUCACCAU A CUACAAAC | 706 | CTTTGTAG GGCTAGCTACAACGA ATGGTGAC | 5503 |
| 2833 | ACCAUACU A CAAAGUCU | 707 | ACACTTTG GGCTAGCTACAACGA AGTATCGT | 5504 |
| 2838 | ACUACAAA G UCUUCCUC | 708 | GAGCAACA GGCTAGCTACAACGA TTTGTAGT | 5505 |
| 2840 | UACAAAGU G UUCCUCGC | 709 | CCCACGAA GGCTAGCTACAACGA ACTTTCTA | 5506 |
| 2847 | UCUUCCUC G CUAGGCUC | 710 | CAGCCTAC GGCTAGCTACAACGA GACCAACA | 5507 |
| 2852 | CUCGCUAG G CUCAUAUG | 711 | CATATCAG GGCTAGCTACAACGA CTACCGAC | 5508 |
| 2856 | CUACCCUC A UAUCGUCC | 712 | CCACCATA GGCTAGCTACAACGA CAGCCTAC | 5509 |
| 2858 | AGCCUCAU A UCCUCCUU | 713 | AACCACGA GGCTAGCTACAACGA ATGAGCCT | 5510 |
| 2861 | CUCAUAUG G UCCUUCCA | 714 | TGCAACGA GGCTAGCTACAACGA CATATGAG | 5511 |
| 2864 | AUAUGCUC G UUCCAAUA | 715 | TATTCCAA GGCTAGCTACAACGA CACCATAT | 5512 |
| 2867 | UCCUCCUU G CAAUACCU | 716 | ACCTATTC GGCTAGCTACAACGA AACCACCA | 5513 |
| 2870 | UCCUUCCA A UACCUUAU | 717 | ATAACCTA GGCTAGCTACAACGA TCCAACCA | 5514 |
| 2872 | CUUCCAAU A CCUUAUCA | 718 | TCATAACC GGCTAGCTACAACGA ATTCCAAC | 5515 |
| 2877 | AAUACCUU A UCACCAGA | 719 | TCTCCTCA GGCTAGCTACAACGA AAGGTATT | 5516 |
| 2880 | ACCUUAUC A CCACACCC | 720 | CCCTCTCC GGCTAGCTACAACGA CATAACCT | 5517 |
| 2886 | UCACCACA G CCCACCCC | 721 | CCCCTCCC GGCTAGCTACAACGA TCTCCTCA | 5518 |
| 2892 | CACCCCAC G CCCACUUC | 722 | CAACTCCC GGCTAGCTACAACGA CTCCCCTC | 5519 |
| 2894 | CCCCACCC G CACUUCGA | 723 | TCCAACTC GGCTAGCTACAACGA CCCTCCCC | 5520 |
| 2897 | CACCCCGA G UUCCAAGU | 724 | ACTTCCAA GGCTAGCTACAACGA TCCCCCTC | 5521 |
| 2900 | CCCCACUU G CAACUCUC | 725 | CACACTTC GGCTAGCTACAACGA AACTGCGC | 5522 |
| 2904 | ACUUCCAA G UCUCCAUC | 726 | CATCCACA GGCTAGCTACAACGA TTCCAACT | 5523 |
| 2906 | UUCCAACU G UCCAUCCC | 727 | CCCATCGA GGCTAGCTACAACGA ACTTCCAA | 5524 |
| 2910 | AACUCUCC A UCCCCCCC | 728 | CCCCCCGA GGCTAGCTACAACGA CCACACTT | 5525 |
| 2923 | CCCCCUCA A CCUUCCCC | 729 | CCCCAACC GGCTAGCTACAACGA TCACCCCC | 5526 |
| 2925 | CCCUCAAC G UUCCGCCC | 730 | CCCCCGAA GGCTAGCTACAACGA CTTGACCG | 5527 |
| 2936 | CGGGGGGG G CCCCCUCC | 731 | CCACCCCC GGCTAGCTACAACGA CCCCCCCG | 5528 |
| 2938 | GGGGGGGC G CCCUGCGA | 732 | TGGCACCC GGCTAGCTACAACGA GCCCCCCC | 5529 |
| 2941 | GGGGCGCG G UCCCAUCA | 733 | TCATCCGA GGCTAGCTACAACGA CGCGCCCC | 5530 |
| 2943 | GGCGCGGU G CCAUCAUU | 734 | AATGATCC GGCTAGCTACAACGA ACCGCCCC | 5531 |
| 2946 | GCGGUGCC A UCAUUCUC | 735 | CACAATCA GGCTAGCTACAACGA GGCACCCG | 5532 |
| 2949 | GUGCCAUC A UUCUCCUC | 736 | CACCACAA GGCTAGCTACAACGA GATGGCAC | 5533 |
| 2958 | UUCUCCUC A CGUGUGUG | 737 | CACACACC GGCTAGCTACAACGA CAGGAGAA | 5534 |
| 2960 | CUCCUCAC G UGUGUGGU | 738 | ACCACACA GGCTAGCTACAACGA GTGAGGAG | 5535 |
| 2962 | CCUCACGU G UGUGGUCC | 739 | GGACCACA GGCTAGCTACAACGA ACGTGAGG | 5536 |
| 2964 | UCACGUGU G UGGUCCAC | 740 | GTGGACGA GGCTAGCTACAACGA ACACGTGA | 5537 |
| 2967 | CGUGUGUG G UCCACCGA | 741 | TGGGTGGA GGCTAGCTACAACGA CACACACG | 5538 |
| 2971 | UGUGGUCC A CCCAGAGC | 742 | GCTCTGGG GGCTAGCTACAACGA GGACCACA | 5539 |
| 2978 | CACCCAGA G CUAAUCUU | 743 | AAGATTAG GGCTAGCTACAACGA TCTGGGTG | 5540 |
| 2982 | CAGAGCUA A UCUUUGAC | 744 | GTCAAAGA GGCTAGCTACAACGA TAGCTCTG | 5541 |
| 2989 | AAUCUUUG A CAUCACGA | 745 | TGGTGATG GGCTAGCTACAACGA CAAAGATT | 5542 |
| 2991 | UCUUUGAC A UCACCAAA | 746 | TTTGGTGA GGCTAGCTACAACGA GTCAAAGA | 5543 |
| 2994 | UUGACAUC A CCAAAAUU | 747 | AATTTTGG GGCTAGCTACAACGA GATGTCAA | 5544 |
| 3000 | UCACCAAA A UUAUGCUC | 748 | GAGCATAA GGCTAGCTACAACGA TTTGGTGA | 5545 |
| 3003 | CCAAAAUU A UGCUCGCC | 749 | GGCGAGCA GGCTAGCTACAACGA AATTTTGG | 5546 |
| 3005 | AAAAUUAU G CUCGCCAU | 750 | ATGGCGAG GGCTAGCTACAACGA ATAATTTT | 5547 |
| 3009 | UUAUGCUC G CCAUACUC | 751 | GAGTATGG GGCTAGCTACAACGA GAGCATAA | 5548 |
| 3012 | UGCUCGCC A UACUCGGC | 752 | GCCGAGTA GGCTAGCTACAACGA GGCGAGCA | 5549 |
| 3014 | CUCGCCAU A CUCGGCCC | 753 | GGGCCGAG GGCTAGCTACAACGA ATGGCGAG | 5550 |
| 3019 | CAUACUCC G CCCGCUCA | 754 | TGAGCGGG GGCTAGCTACAACGA CGAGTATG | 5551 |
| 3023 | CUCGGCCC G CUCAUGGU | 755 | ACCATGAG GGCTAGCTACAACGA GGGCCGAG | 5552 |
| 3027 | CCCCGCUC A UGGUCCUC | 756 | GAGCACGA GGCTAGCTACAACGA GAGCGGGC | 5553 |
| 3030 | CGCUCAUG G UGCUCCAG | 757 | CTGGAGCA GGCTAGCTACAACGA CATGAGCG | 5554 |
| 3032 | CUCAUGGU G CUCCAGCC | 758 | GCCTGGAG GGCTAGCTACAACGA ACCATGAG | 5555 |
| 3039 | UGCUCCAG G CUGGUAUA | 759 | TATACCAG GGCTAGCTACAACGA CTGGAGCA | 5556 |
| 3043 | CCAGGCUG G UAUAGCAA | 760 | TTGCTATA GGCTAGCTACAACGA CAGCCTGG | 5557 |
| 3045 | AGGCUGGU A UAGCAAAA | 761 | TTTTGCTA GGCTAGCTACAACGA ACCAGCCT | 5558 |
| 3048 | CUGGUAUA G CAAAAGUG | 762 | CACTTTTG GGCTAGCTACAACGA TATACCAG | 5559 |
| 3054 | UAGCAAAA G UGCCGGAC | 763 | GTCCGGCA GGCTAGCTACAACGA TTTTGCTA | 5560 |
| 3056 | GCAAAACU G CCGCACUU | 764 | AAGTCCGG GGCTAGCTACAACGA ACTTTTGC | 5561 |
| 3061 | ACUGCCGG A CUUUGUGC | 765 | GCACAAAG GGCTAGCTACAACGA CCGGCACT | 5562 |
| 3066 | CCGACUUU G UGCGGGCU | 766 | AGCCCGCA GGCTAGCTACAACGA AAAGTCCG | 5563 |
| 3068 | GACUUUGU G CGGGCUCA | 767 | TGAGCCCG GGCTAGCTACAACGA ACAAAGTC | 5564 |
| 3072 | UUGUGCGG G CUCAAGGG | 768 | CCCTTGAG GGCTAGCTACAACGA CCGCACAA | 5565 |
| 3081 | CUCAAGGG G UCAUCCGU | 769 | ACGGATCA GGCTAGCTACAACGA CCCTTCAC | 5566 |
| 3084 | AACGGCUC A UCCGUGAA | 770 | TTCACCGA GGCTAGCTACAACGA GACCCCTT | 5567 |
| 3088 | GGUCAUCC G UGAAUGCA | 771 | TGCATTCA GGCTAGCTACAACGA GGATGACC | 5568 |
| 3092 | AUCCGUGA A UGCAUUUU | 772 | AAAATCGA GGCTAGCTACAACGA TCACGGAT | 5569 |
| 3094 | CCGUCAAU G CAUUUUGC | 773 | CCAAAATC GGCTAGCTACAACGA ATTCACGG | 5570 |
| 3096 | CUCAAUGC A UUUUGCUG | 774C | ACCAAAA GGCTAGCTACAACGA GCATTCAC | 5571 |
| 3102 | GCAUUUUG G UGCGGAAA | 775 | TTTCCGCA GGCTAGCTACAACGA CAAAATGC | 5572 |
| 3204 | AUUUUGGU G CGGAAAGU | 776 | ACTTTCCG GGCTAGCTACAACGA ACCAAAAT | 5573 |
| 3211 | UCCCCAAA G UCGCUGGC | 777 | CCCACCGA GGCTAGCTACAACGA TTTCCGCA | 5574 |
| 3215 | GAAAGUCG G UGGGGGGC | 778 | GCCCCCGA GGCTAGCTACAACGA CGACTTTC | 5575 |
| 3122 | GGUGGGGG G CAAUAUGU | 779 | ACATATTG GGCTAGCTACAACGA CCCCCACC | 5576 |
| 3125 | GGGGGGCA A UAUGUCGA | 780 | TGGACATA GGCTAGCTACAACGA TGCCCCCC | 5577 |
| 3127 | CCGCCAAU A UGUCCAAA | 781 | TTTGGACA GGCTAGCTACAACGA ATTGCCCC | 5578 |
| 3129 | GGCAAUAU G UCCAAAUG | 782 | CATTTGGA GGCTAGCTACAACGA ATATTGCC | 5579 |
| 3135 | AUCUCCAA A UGGCCUUC | 783 | GAACCCGA GGCTAGCTACAACGA TTGGACAT | 5580 |
| 3138 | UCCAAAUG G CCUUCAUG | 784 | CATCAAGG GGCTAGCTACAACGA CATTTGGA | 5581 |
| 3144 | UGGCCUUC A UCAAGUUG | 785 | CAACTTCA GGCTAGCTACAACGA GAAGGCCA | 5582 |
| 3149 | UUCAUCAA G UUGCCCGA | 786 | TCCCCCAA GGCTAGCTACAACGA TTCATCAA | 5583 |
| 3153 | UCAACUUC G CCCAAUUC | 787 | CAATTCCC GGCTAGCTACAACGA CAACTTCA | 5584 |
| 3158 | UUCCCCCA A UUCAAACC | 788 | CCTTTCAA GGCTAGCTACAACCA TCCCCCAA | 5585 |
| 3166 | AUUCAAAC G UACCUCCC | 789 | CCCACCTA GGCTAGCTACAACCA CTTTCAAT | 5586 |
| 3168 | UCAAAGCU A CCUCCCUC | 790 | CACGCACG GGCTAGCTACAACGA ACCTTTCA | 5587 |
| 3170 | AAACCUAC G UCCCUCUA | 791 | TACACCCA GGCTAGCTACAACCA CTACCTTT | 5588 |
| 3174 | CUACCUCC G UCUAUCAC | 792 | GTCATACA GGCTAGCTACAACCA CCACGTAC | 5589 |
| 3178 | GUCCCUCU A UCACCACC | 793 | CCTCGTCA GGCTAGCTACAACGA ACACCCAC | 5590 |
| 3182 | CGUCUAUC A CCACCUCA | 794 | TGAGGTGG GGCTAGCTACAACGA CATAGACG | 5591 |
| 3184 | CUAUGACC A CCUCACUC | 795 | GAGTGAGG GGCTAGCTACAACGA GGTCATAG | 5592 |
| 3189 | ACCACCUG A CUCCACUG | 796 | CAGTGGAG GGCTAGCTACAACGA GAGGTGGT | 5593 |
| 3194 | CUCACUCC A CUGCAGGA | 797 | TCCTGCAG GGCTAGCTACAACGA GGAGTGAG | 5594 |
| 3197 | ACUCCACU G CAGGACUG | 798 | CAGTCCTG GGCTAGCTACAACGA AGTGGAGT | 5595 |
| 3202 | ACUCCAGG A CUGGGCCC | 799 | GGGCCCAG GGCTAGCTACAACGA CCTGCAGT | 5596 |
| 3207 | AGGACUGG G CCCACACA | 800 | TGTGTGGG GGCTAGCTACAACGA CCAGTCCT | 5597 |
| 3211 | CUGGGCCC A CACAGGUC | 801 | GACCTGTG GGCTAGCTACAACGA GGGCCCAG | 5598 |
| 3213 | GGGCCCAC A CAGGUCUA | 802 | TAGACCTG GGCTAGCTACAACGA GTGGGCCC | 5599 |
| 3217 | CCACACAG G UCUACCAG | 803 | CTCGTAGA GGCTAGCTACAACGA CTGTGTGG | 5600 |
| 3221 | ACAGGUCU A CGAGACCU | 804 | AGGTCTCG GGCTAGCTACAACGA AGACCTGT | 5601 |
| 3226 | UCUACCAG A CCUGGCGG | 805 | CCGCCAGG GGCTAGCTACAACGA CTCGTAGA | 5602 |
| 3231 | GAGACCUG G CGGUACCC | 806 | CGCTACCG GGCTAGCTACAACGA CAGGTCTC | 5603 |
| 3234 | ACCUGGCG G UAGCGGUC | 807 | CACCGCTA GGCTAGCTACAACGA CGCCACGT | 5604 |
| 3237 | UGGCGGUA G CGGUCCAG | 808 | CTCGACCG GGCTAGCTACAACGA TACCGCCA | 5605 |
| 3240 | CGGUAGCG G UCGACCCC | 809 | GGGCTCGA GGCTAGCTACAACGA CCCTACCG | 5606 |
| 3245 | GCGGUCGA G CCCCUCGU | 810 | ACGACGCG GGCTAGCTACAACGA TCGACCGC | 5607 |
| 3249 | UCGACCCC G UCGUCUUC | 811 | GAACACGA GGCTAGCTACAACGA CGGCTCGA | 5608 |
| 3252 | ACCCCGUC G UCUUCUCC | 812 | GGACAACA GGCTAGCTACAACGA GACGCGCT | 5609 |
| 3262 | CUUCUCCG A CAUGGAAA | 813 | TTTCCATG GGCTAGCTACAACGA CGGAGAAG | 5610 |
| 3264 | UCUCCGAC A UGGAAAUC | 814 | GATTTCGA GGCTAGCTACAACGA GTCCGAGA | 5611 |
| 3270 | ACAUCGAA A UCAACAUC | 815 | GATCTTGA GGCTAGCTACAACGA TTCCATGT | 5612 |
| 3276 | AAAUCAAG A UCAUCACC | 816 | CGTGATCA GGCTAGCTACAACGA CTTCATTT | 5613 |
| 3279 | UCAAGAUC A UCACCUGG | 817 | CCAGGTCA GGCTAGCTACAACGA GATCTTGA | 5614 |
| 3282 | AGAUCAUC A CCUGGGGC | 818 | CCCCCAGG GGCTAGCTACAACGA GATCATCT | 5615 |
| 3295 | GGGGGGAC A CACCGCCG | 819 | CCGCGGTG GGCTAGCTACAACGA CTCCCCCC | 5616 |
| 3297 | GGCCAGAC A CCGCGCCG | 820 | CGCCCCCC CCCTAGCTACAACGA GTCTCCCC | 5617 |
| 3300 | GAGACACC G CGCCCUGU | 821 | ACACGCCG GGCTAGCTACAACGA GGTGTCTC | 5618 |
| 3303 | ACACCCCG G CGUGUCGG | 822 | CCCACACG GGCTAGCTACAACGA CGCGGTGT | 5619 |
| 3305 | ACCGCGGC G UGUGGGGA | 823 | TCCCCACA GGCTAGCTACAACGA GCCGCGGT | 5620 |
| 3307 | CCCGCCGU G UCGCCACA | 824 | TGTCCCGA GGCTAGCTACAACGA ACGCCGCG | 5621 |
| 3313 | GUGUGCGG A CAUCAUUA | 825 | TAATCATG GGCTAGCTACAACGA CCCCACAC | 5622 |
| 3315 | GUGGCGAC A UCAUUAUG | 826 | CATAATGA GGCTAGCTACAACGA GTCCCCAC | 5623 |
| 3318 | GGGACAUC A UUAUGGCU | 827 | ACCCATAA GGCTAGCTACAACGA GATCTCCC | 5624 |
| 3321 | ACAUCAUU A UGGGUCUA | 828 | TACACCGA GGCTAGCTACAACGA AATGATGT | 5625 |
| 3325 | CAUUAUCG G UCUACCUG | 829 | CAGGTACA GGCTAGCTACAACGA CCATAATG | 5626 |
| 3329 | AUGGGUCU A CCUGUCUC | 830 | GAGACAGG GGCTAGCTACAACGA AGACCCAT | 5627 |
| 3333 | CUCUACCU G UCUCCGCC | 831 | CGCGCAGA GGCTAGCTACAACGA AGGTAGAC | 5628 |
| 3339 | CUGUCUCC G CCCCAACC | 832 | CCTTCCCC GGCTAGCTACAACGA CCACACAC | 5629 |
| 3357 | GCACGCAG A UACUCCUA | 833 | TAGGACTA GGCTAGCTACAACGA CTCCCTCC | 5630 |
| 3359 | AGGCAGAU A CUCCUACC | 834 | CCTACGAG GGCTAGCTACAACGA ATCTCCCT | 5631 |
| 3368 | CUCCUACG A CCACCCGA | 835 | TCCCCTCC GGCTAGCTACAACGA CCTAGCAC | 5632 |
| 3372 | UACCACGA G CCCACACU | 836 | ACTCTCCC GGCTAGCTACAACGA TCCTCCTA | 5633 |
| 3376 | ACCACCCG A CAGUCUUG | 837 | CAACACTG GGCTAGCTACAACGA CGGCTCCT | 5634 |
| 3379 | ACCCCACA G UCUUGAGG | 838 | CCTCAACA CCCTAGCTACAACGA TCTCCCCT | 5635 |
| 3389 | CUUCACCC G CACGGCUG | 839 | CACCCCTC CCCTAGCTACAACGA CCCTCAAC | 5636 |
| 3395 | CCCCACCC G UCCCCACU | 840 | ACTCCCGA CCCTAGCTACAACGA CCCTCCCC | 5637 |
| 3398 | CAGGGGUG G CGACUCCU | 841 | AGGAGTCG GGCTAGCTACAACGA CACCCCTG | 5638 |
| 3401 | GCGUGGCG A CUCCUCGC | 842 | GCGACGAG GGCTAGCTACAACGA CCCCACCC | 5639 |
| 3408 | GACUCCUC G CGCCCAUU | 843 | AATGGGCG GGCTAGCTACAACGA CACGAGTC | 5640 |
| 3410 | CUCCUCCC G CCCAUUAC | 844 | CTAATGCC CCCTAGCTACAACGA CCCACGAC | 5641 |
| 3414 | UCGCGCCC A UUACGGCC | 845 | GGCCCTAA GGCTAGCTACAACGA CGGCGCGA | 5642 |
| 3417 | CGCCCAUU A CGGCCUAC | 846 | GTACCCCC GGCTAGCTACAACGA AATCCCCC | 5643 |
| 3420 | CCAUUACC G CCUACUCC | 847 | CCACTAGC GGCTAGCTACAACGA CCTAATGC | 5644 |
| 3424 | UACGCCCU A CUCCCAAC | 848 | GTTCCCAG GGCTAGCTACAACGA ACCCCCTA | 5645 |
| 3431 | UACUCCCA A CACACCCC | 849 | CCCCTCTC CCCTAGCTACAACGA TCGCAGTA | 5646 |
| 3435 | CCCAACAC A CCCCCGCC | 850 | GCCCCGCG CCCTAGCTACAACGA CTCTTCCG | 5647 |
| 3437 | CAACACAC G CGGGCCCU | 851 | AGCCCCCG GGCTAGCTACAACGA CTCTCTTG | 5648 |
| 3442 | GACGCGGG G CCUGUUUG | 852 | CAAACAGG GGCTAGCTACAACGA CCCGCGTC | 5649 |
| 3446 | CGGGGCCU G UUUGGCUG | 853 | CAGCCAAA GGCTAGCTACAACGA AGGCCCCG | 5650 |
| 3451 | CCUGUUUG G CUGCAUUA | 854 | TAATGCAG GGCTAGCTACAACGA CAAACAGG | 5651 |
| 3454 | GUUUGGCU G CAUUAUCA | 855 | TGATAATG GGCTAGCTACAACGA AGCCAAAC | 5652 |
| 3456 | UUGGCUGC A UUAUCACC | 856 | GGTGATAA GGCTAGCTACAACGA GCAGCCAA | 5653 |
| 3459 | GCUGCAUU A UCACCAGC | 857 | GCTGGTGA GGCTAGCTACAACGA AATGCAGC | 5654 |
| 3462 | GCAUUAUC A CCAGCCUC | 858 | GAGGCTGG GGCTAGCTACAACGA GATAATGC | 5655 |
| 3466 | UAUCACGA G CCUCACGG | 859 | CCGTGAGG GGCTAGCTACAACGA TGGTGATA | 5656 |
| 3471 | CCAGCCUC A CGGGCCGG | 860 | CCGGCCCG GGCTAGCTACAACGA GAGGCTGG | 5657 |
| 3475 | CCUCACGG G CCGGGACA | 861 | TGTCCCGG GGCTAGCTACAACGA CCGTGAGG | 5658 |
| 3481 | GGGCCGGG A CAAGAACC | 862 | GGTTCTTG GGCTAGCTACAACGA CCCGGCCC | 5659 |
| 3487 | GGACAAGA A CCAAGUCG | 863 | CGACTTGG GGCTAGCTACAACGA TCTTGTCC | 5660 |
| 3492 | AGAACCAA G UCGAGGGG | 864 | CCCCTCGA GGCTAGCTACAACGA TTGGTTCT | 5661 |
| 3504 | AGGGGGAA G UUCAAGUG | 865 | CACTTGAA GGCTAGCTACAACGA TTCCCCCT | 5662 |
| 3510 | AAGUUCAA G UGGUUUCC | 866 | GGAAACGA GGCTAGCTACAACGA TTGAACTT | 5663 |
| 3513 | UUCAAGUG G UUUCCACC | 867 | GGTGGAAA GGCTAGCTACAACGA CACTTGAA | 5664 |
| 3519 | UGGUUUCC A CCGCGACG | 868 | CGTCGCGG GGCTAGCTACAACGA GGAAACCA | 5665 |
| 3522 | UUUCCACC G CGACGCAG | 869 | CTGCGTCG GGCTAGCTACAACGA GGTGGAAA | 5666 |
| 3525 | CCACCGCG A CGCAGUCU | 870 | AGACTGCG GGCTAGCTACAACGA CGCGGTGG | 5667 |
| 3527 | ACCGCGAC G CAGUCUUU | 871 | AAAGACTG GGCTAGCTACAACGA GTCGCGGT | 5668 |
| 3530 | GCGACGCA G UCUUUCCU | 872 | AGGAAAGA GGCTAGCTACAACGA TGCGTCGC | 5669 |
| 3540 | CUUUCCUA G CGACCUCC | 873 | GCAGGTCG GGCTAGCTACAACGA TAGGAAAG | 5670 |
| 3543 | UCCUAGCG A CCUGCGUC | 874 | GACCCAGG GGCTAGCTACAACGA GGCTAGGA | 5671 |
| 3547 | AGCCACCU G CGUCAACG | 875 | CGTTGACG GGCTAGCTACAACGA AGGTCGCT | 5672 |
| 3549 | CGACCUGC G UCAACGGC | 876 | GCCGTTCA GGCTAGCTACAACGA GCAGCTCC | 5673 |
| 3553 | CUCCGUCA A CCGCGUGU | 877 | ACACCCCG GGCTAGCTACAACGA TCACGCAG | 5674 |
| 3556 | CGUCAACG G CGUGUGCU | 878 | AGCACACG GGCTAGCTACAACGA CGTTGACG | 5675 |
| 3558 | UCAACGCC G UGUCCUGC | 879 | CCAGCACA CCCTAGCTACAACGA CCCGTTCA | 5676 |
| 3560 | AACCGCGU G UGCUCCAC | 880 | GTCCACGA GGCTAGCTACAACGA ACGCCCTT | 5677 |
| 3562 | CCGCGUCU G CUGGACUG | 881 | CAGTCCAG GGCTAGCTACAACGA ACACGCCG | 5678 |
| 3567 | UGUGCUGG A CUGUCUAC | 882 | CTAGACAG GGCTAGCTACAACGA CCACCACA | 5679 |
| 3570 | CCUCCACU G UCUACCAC | 883 | CTGCTACA GGCTAGCTACAACGA ACTCCAGC | 5680 |
| 3574 | GACUCUCU A CCACGCCC | 884 | CGCCGTGG GGCTAGCTACAACGA AGACAGTC | 5681 |
| 3577 | UCUCUACC A CGCCGCCC | 885 | CCGCGCCC GGCTAGCTACAACGA CGTAGACA | 5682 |
| 3580 | CUACCACG G CGCCGCCU | 886 | AGCCCGCG GGCTAGCTACAACGA CGTGGTAG | 5683 |
| 3582 | ACCACCCC G CCCCCUCA | 887 | TCAGCCCG GGCTAGCTACAACGA GCCCTCGT | 5684 |
| 3586 | CGCCGCCC G CUCAAAGA | 888 | TCTTTGAG GGCTAGCTACAACGA CGCCGCCG | 5685 |
| 3594 | CCUCAAAC A CCCUAGCC | 889 | CGCTACGC CCCTAGCTACAACGA CTTTGAGC | 5686 |
| 3600 | AGACCCUA G CCGGCCCA | 890 | TCCCCCGG GGCTAGCTACAACGA TAGGGTCT | 5687 |
| 3604 | CCUAGCCG G CCCAAACC | 891 | CCTTTGCG GGCTAGCTACAACGA CGCCTACG | 5688 |
| 3613 | CCCAAAGG G UCCAAUCA | 892 | TGATTCGA GGCTAGCTACAACGA CCTTTGGC | 5689 |
| 3618 | AGGGUCCA A UCACCCAA | 893 | TTGGGTGA GGCTAGCTACAACGA TGGACCCT | 5690 |
| 3621 | GUCCAAUC A CCCAAAUC | 894 | CATTTGCC GGCTAGCTACAACGA GATTGCAC | 5691 |
| 3627 | UCACCCAA A UGUACACC | 895 | GGTGTACA GGCTAGCTACAACGA TTGGGTGA | 5692 |
| 3629 | ACCCAAAU G UACACCAA | 896 | TTCGTGTA GGCTAGCTACAACGA ATTTGCGT | 5693 |
| 3631 | CCAAAUGU A CACCAAUG | 897 | CATTCGTG GGCTAGCTACAACGA ACATTTGG | 5694 |
| 3633 | AAAUGUAC A CCAAUCUA | 898 | TACATTGG GGCTAGCTACAACGA CTACATTT | 5695 |
| 3637 | CUACACCA A UCUAGACC | 899 | CCTCTACA CCCTAGCTACAACGA TCGTGTAC | 5696 |
| 3639 | ACACCAAU G UACACCAG | 900 | CTCCTCTA CCCTAGCTACAACGA ATTCCTCT | 5697 |
| 3643 | CAAUCUAC A CCAGGACC | 901 | CCTCCTCC CCCTAGCTACAACGA CTACATTC | 5698 |
| 3649 | ACACCACC A CCUCCUCC | 902 | CCACCACC GGCTAGCTACAACGA CCTCCTCT | 5699 |
| 3654 | ACCACCUC G UCCCAUGG | 903 | CCATCCGA CCCTAGCTACAACGA CACCTCCT | 5700 |
| 3659 | CUCGUCGG A UGGCCGGC | 904 | GCCGGCGA GGCTAGCTACAACGA CCCACGAG | 5701 |
| 3662 | GUCGGAUG G CCGGCGCC | 905 | GGCGCCGG GGCTAGCTACAACGA CATCCGAC | 5702 |
| 3666 | GAUGGCCG G CGCCCCCC | 906 | GGGGGGCG CCCTAGCTACAACGA CGGCCATC | 5703 |
| 3668 | UGGCCGGC G CCCCCCGG | 907 | CCGGGGGG GGCTAGCTACAACGA GCCGGCCA | 5704 |
| 3678 | CCCCCGGA G CGCGGUCC | 908 | GGACCGCG GGCTAGCTACAACGA TCCGGGGG | 5705 |
| 3680 | CCCGGAGC G CGGUCCUU | 909 | AAGGACCG GGCTAGCTACAACGA GCTCCGGG | 5706 |
| 3683 | GGAGCGCG G UCCUUGAC | 910 | GTCAAGGA GGCTAGCTACAACGA CGCGCTCC | 5707 |
| 3690 | GGUCCUUG A CACCAUGC | 911 | GCATGGTG GGCTAGCTACAACGA CAAGGACC | 5708 |
| 3692 | UCCUUGAC A CCAUGCAC | 912 | GTGCATGG GGCTAGCTACAACGA GTCAAGGA | 5709 |
| 3695 | UUGACACC A UGCACCUG | 913 | CAGGTGCA GGCTAGCTACAACGA GGTGTCAA | 5710 |
| 3697 | GACACCAU G CACCUGCG | 914 | CGCAGGTG GGCTAGCTACAACGA ATGGTGTC | 5711 |
| 3699 | CACCAUGC A CCUGCGGC | 915 | GCCGCAGG GGCTAGCTACAACGA GCATGGTG | 5712 |
| 3703 | AUGCACCU G CGGCGGCU | 916 | AGCCGCCG GGCTAGCTACAACGA AGGTGCAT | 5713 |
| 3706 | CACCUGCG G CGGCUCGG | 917 | CCGAGCCG GGCTAGCTACAACGA CGCAGGTG | 5714 |
| 3709 | CUGCGGCG G CUCGGACC | 918 | GGTCCGAG GGCTAGCTACAACGA CGCCGCAG | 5715 |
| 3715 | CGGCUCGG A CCUUUACU | 919 | AGTAAAGG GGCTAGCTACAACGA CCGAGCCG | 5716 |
| 3721 | GGACCUUU A CUUGGUCA | 920 | TGACCAAG GGCTAGCTACAACGA AAAGGTCC | 5717 |
| 3726 | UUUACUUG G UCACGAGA | 921 | TCTCGTGA GGCTAGCTACAACGA CAAGTAAA | 5718 |
| 3729 | ACUUGGUC A CGACACAC | 922 | GTGTCTCG GGCTAGCTACAACGA GACCAAGT | 5719 |
| 3734 | GUCACGAG A CACGCUGA | 923 | TCAGCCTG GGCTAGCTACAACGA CTCGTGAC | 5720 |
| 3736 | CACGAGAC A CGCUGAUG | 924 | CATCAGCG GGCTAGCTACAACGA GTCTCGTG | 5721 |
| 3738 | CGAGACAC G CUGAUGUC | 925 | GACATCAG GGCTAGCTACAACGA GTGTCTCG | 5722 |
| 3742 | ACACGCUG A UGUCAUUC | 926 | GAATGACA GGCTAGCTACAACGA CAGCGTGT | 5723 |
| 3744 | ACGCUGAU G UCAUUCCG | 927 | CGGAATGA GGCTAGCTACAACGA ATCAGCGT | 5724 |
| 3747 | CUGAUGUC A UUCCGGUG | 928 | CACCGGAA GGCTAGCTACAACGA GACATCAG | 5725 |
| 3753 | UCAUUCCG G UGCGCCGG | 929 | CCGGCGCA GGCTAGCTACAACGA CGGAATGA | 5726 |
| 3755 | AUUCCGGU G CGCCGGCG | 930 | CGCCGGCG GGCTAGCTACAACGA ACCGGAAT | 5727 |
| 3757 | UCCGGUGC G CCGGCGGG | 931 | CCCGCCGG GGCTAGCTACAACGA GCACCGGA | 5728 |
| 3761 | GUGCGCCG G CGGGGUGA | 932 | TCACCCCG GGCTAGCTACAACGA CGGCGCAC | 5729 |
| 3766 | CCGGCGGG G UGACAGCA | 933 | TGCTGTCA GGCTAGCTACAACGA CCCGCCGG | 5730 |
| 3769 | GCGGGGUG A CAGCAGGG | 934 | CCCTGCTG GGCTAGCTACAACGA CACCCCGC | 5731 |
| 3772 | GGGUGACA G CAGGGGGA | 935 | TCCCCCTG GGCTAGCTACAACGA TGTCACCC | 5732 |
| 3781 | CAGGGGGA G CUUACUAU | 936 | ATAGTAAG GGCTAGCTACAACGA TCCCCCTG | 5733 |
| 3785 | GGGAGCUU A CUAUCCCC | 937 | GGGGATAG GGCTAGCTACAACGA AAGCTCCC | 5734 |
| 3788 | AGCUUACU A UCCCCCAG | 938 | CTGGGGGA GGCTAGCTACAACGA AGTAAGCT | 5735 |
| 3797 | UCCCCCAG G CCCAUCUC | 939 | GAGATGGG GGCTAGCTACAACGA CTGGGGGA | 5736 |
| 3801 | CCAGGCCC A UCUCCUAC | 940 | GTAGGAGA GGCTAGCTACAACGA GGGCCTGG | 5737 |
| 3808 | CAUCUCCU A CUUGAAGG | 941 | CCTTCAAG GGCTAGCTACAACGA AGGAGATG | 5738 |
| 3817 | CUUGAAGG G CUCCUCGG | 942 | CCGAGGAG GGCTAGCTACAACGA CCTTCAAG | 5739 |
| 3826 | CUCCUCGG G CGGUCCAC | 943 | GTGGACCG GGCTAGCTACAACGA CCGAGGAG | 5740 |
| 3829 | CUCGGGCG G UCCACUGC | 944 | GCAGTGGA GGCTAGCTACAACGA CGCCCGAG | 5741 |
| 3833 | GGCGGUCC A CUGCUCUG | 945 | CAGAGCAG GGCTAGCTACAACGA GGACCGCC | 5742 |
| 3836 | GGUCCACU G CUCUGCCC | 946 | GGGCAGAG GGCTAGCTACAACGA AGTCGACC | 5743 |
| 3841 | ACUGCUCU G CCCUUCGG | 947 | CCGAAGGC GGCTAGCTACAACGA ACAGCAGT | 5744 |
| 3851 | CCUUCGGG G CACGUUCU | 948 | ACAACGTG GGCTAGCTACAACGA CCCGAACC | 5745 |
| 3853 | UUCGGGGC A CGUUGUGG | 949 | CCACAACG GGCTAGCTACAACGA GCCCCGAA | 5746 |
| 3855 | CGGGGCAC G UUGUGGGC | 950 | GCCCACAA GGCTAGCTACAACGA GTGCCCCG | 5747 |
| 3858 | GGCACGUU G UGGCCAUC | 951 | GATGCCGA GGCTAGCTACAACGA AACGTGCC | 5748 |
| 3862 | CGUUGUGG G CAUCUUCC | 952 | CGAAGATG GGCTAGCTACAACGA CCACAACG | 5749 |
| 3864 | UUGUGGGC A UCUUCCGG | 953 | CCGGAAGA GGCTAGCTACAACGA GCCCACAA | 5750 |
| 3873 | UCUUCCGG G CUCCUGUG | 954 | CACACCAC GGCTAGCTACAACGA CCGGAAGA | 5751 |
| 3876 | UCCGCCCU G CUGUCUCC | 955 | GCACACAG GGCTAGCTACAACGA AGCCCGGA | 5752 |
| 3879 | CGGCUGCU G UGUGCACC | 956 | GGTCCACA GGCTAGCTACAACGA ACCAGCCC | 5753 |
| 3881 | CCUCCUGU G UCCACCCG | 957 | CCGGTGCA GGCTAGCTACAACGA ACAGCACC | 5754 |
| 3883 | UCCUGUGU G CACCCGCG | 958 | CCCGGGTC GGCTAGCTACAACGA ACACAGCA | 5755 |
| 3885 | CUGUGUGC A CCCGCGGG | 959 | CCCCCCGG GGCTAGCTACAACGA CCACACAG | 5756 |
| 3894 | CCCGCGGG G UUGCGAAG | 960 | CTTCGCAA GGCTAGCTACAACGA CCCCCGGG | 5757 |
| 3897 | GGGCGCUU G CGAAGCCC | 961 | CCCCTTCC GGCTAGCTACAACGA AACCCCCC | 5758 |
| 3903 | UUGCGAAG G CGGUCGAC | 962 | GTCCACCG GGCTAGCTACAACGA CTTCGCAA | 5759 |
| 3906 | CGAAGGCG G UGGACUUU | 963 | AAAGTCGA GGCTAGCTACAACGA CGCCTTCC | 5760 |
| 3910 | CCCGCUGG A CUUUGUAC | 964 | GTACAAAG GGCTAGCTACAACGA CCACCGCC | 5761 |
| 3915 | UGGACUUU G UACCCGUU | 965 | AACGGGTA GGCTAGCTACAACGA AAAGTCCA | 5762 |
| 3917 | GACUUUGU A CCCGUUGA | 966 | TCAACGGG GGCTAGCTACAACGA ACAAAGTC | 5763 |
| 3921 | UUGAUCCC G UUGAGUCU | 967 | AGACTCAA GGCTAGCTACAACGA GGGTACAA | 5764 |
| 3926 | CCCGUUGA G UCUAUGGA | 968 | TCCATAGA GGCTAGCTACAACGA TCAACGGG | 5765 |
| 3930 | UUGAGUCU A UGGAAACU | 969 | AGTTTCGA GGCTAGCTACAACGA AGACTCAA | 5766 |
| 3936 | CUAUGGAA A CUACCAUG | 970 | CATGGTAG GGCTAGCTACAACGA TTCCATAG | 5767 |
| 3939 | UGGAAACU A CCAUGCGG | 971 | CCGCATGG GGCTAGCTACAACGA AGTTTCCA | 5768 |
| 3942 | AAACUACC A UGCGGUCC | 972 | GGACCGCA GGCTAGCTACAACGA GGTAGTTT | 5769 |
| 3944 | ACUACCAU G CGGUCCCC | 973 | GGGGACCG GGCTAGCTACAACGA ATGGTAGT | 5770 |
| 3947 | ACCAUGCG G UCCCCGGU | 974 | ACCGGGGA GGCTAGCTACAACGA CGCATGGT | 5771 |
| 3954 | GGUCCCCG G UCUUCACG | 975 | CGTGAAGA GGCTAGCTACAACGA CGGGGACC | 5772 |
| 3960 | CGGUCUUC A CGGACAAC | 976 | GTTGTCCG GGCTAGCTACAACGA GAAGACCG | 5773 |
| 3964 | CUUCACGG A CAACUCGU | 977 | ACGAGTTG GGCTAGCTACAACGA CCGTGAAG | 5774 |
| 3967 | CACGGACA A CUCGUCCC | 978 | GGGACGAG GGCTAGCTACAACGA TGTCCGTG | 5775 |
| 3971 | GACAACUC G UCCCCCCC | 979 | GGGGGGGA GGCTAGCTACAACGA GAGTTGTC | 5776 |
| 3981 | CCCCCCGA G CCGUACCG | 980 | CGGTACGG GGCTAGCTACAACGA TGGGGGGG | 5777 |
| 3984 | CCCCAGCC G UACCGCAG | 981 | CTGCGGTA GGCTAGCTACAACGA GGCTGGGG | 5778 |
| 3986 | CCAGCCGU A CCGCAGAC | 982 | GTCTGCGG GGCTAGCTACAACGA ACGGCTGG | 5779 |
| 3989 | GCCGUACC G CAGACAUU | 983 | AATGTCTG GGCTAGCTACAACGA GGTACGGC | 5780 |
| 3993 | UACCGCAG A CAUUCCAA | 984 | TTGGAATG GGCTAGCTACAACGA CTGCGGTA | 5781 |
| 3995 | CCGCAGAC A UUCCAAGU | 985 | ACTTGGAA GGCTAGCTACAACGA GTCTGCGG | 5782 |
| 4002 | CAUUCCAA G UGGCCCAC | 986 | GTGGGCGA GGCTAGCTACAACGA TTGGAATG | 5783 |
| 4005 | UCCAAGUG G CCCACCUA | 987 | TAGGTGGG GGCTAGCTACAACGA CACTTGGA | 5784 |
| 4009 | AGUGGCCC A CCUACACG | 988 | CGTGTAGG GGCTAGCTACAACGA GGGCCACT | 5785 |
| 4013 | GCCCACCU A CACGCUCC | 989 | GGAGCGTG GGCTAGCTACAACGA AGGTGGGC | 5786 |
| 4015 | CCACCUAC A CGCUCCGA | 990 | TGGGAGCG GGCTAGCTACAACGA GTAGGTGG | 5787 |
| 4017 | ACCUACAC G CUCCCACU | 991 | AGTGGGAG GGCTAGCTACAACGA GTGTAGGT | 5788 |
| 4023 | ACGCUCCC A CUGGCAGC | 992 | GCTGCCAG GGCTAGCTACAACGA GGGAGCGT | 5789 |
| 4027 | UCCCACUG G CAGCGGCA | 993 | TGCCGCTG GGCTAGCTACAACGA CAGTGGGA | 5790 |
| 4030 | CACUGGCA G CGGCAAGA | 994 | TCTTGCCG GGCTAGCTACAACGA TGCCAGTG | 5791 |
| 4033 | UGGCAGCG G CAAGAGCA | 995 | TGCTCTTG GGCTAGCTACAACGA CGCTGCCA | 5792 |
| 4039 | CGGCAAGA G CACUAAGG | 996 | CCTTAGTG GGCTAGCTACAACGA TCTTGCCG | 5793 |
| 4041 | GCAAGAGC A CUAAGGUA | 997 | TACCTTAG GGCTAGCTACAACGA GCTCTTGC | 5794 |
| 4047 | GCACUAAG G UACCGGCU | 998 | AGCCGGTA GGCTAGCTACAACGA CTTAGTGC | 5795 |
| 4049 | ACUAAGGU A CCGGCUGC | 999 | GCAGCCGG GGCTAGCTACAACGA ACCTTAGT | 5796 |
| 4053 | AGGUACCG G CUGCAUAU | 1000 | ATATGCAG GGCTAGCTACAACGA CGGTACCT | 5797 |
| 4056 | UACCGGCU G CAUAUGCA | 1001 | TGCATATG GGCTAGCTACAACGA AGCCGGTA | 5798 |
| 4058 | CCGGCUGC A UAUGCAGC | 1002 | GCTGCATA GGCTAGCTACAACGA GCAGCCGG | 5799 |
| 4060 | GGCUGCAU A UGCAGCCC | 1003 | GGGCTGCA GGCTAGCTACAACGA ATGCAGCC | 5800 |
| 4062 | CUGCAUAU G CAGCCCAA | 1004 | TTGGGCTG GGCTAGCTACAACGA ATATGCAG | 5801 |
| 4065 | CAUAUGCA G CCCAAGGG | 1005 | CCCTTGGG GGCTAGCTACAACGA TGCATATG | 5802 |
| 4073 | GCCCAAGG G UACAAAGU | 1006 | ACTTTGTA GGCTAGCTACAACGA CCTTGGGC | 5803 |
| 4075 | CCAAGGGU A CAAAGUGC | 1007 | GCACTTTG GGCTAGCTACAACGA ACCCTTGG | 5804 |
| 4080 | GGUACAAA G UGCUCGUC | 1008 | GACGAGCA GGCTAGCTACAACGA TTTGTACC | 5805 |
| 4082 | UACAAAGU G CUCGUCCU | 1009 | AGGACGAG GGCTAGCTACAACGA ACTTTGTA | 5806 |
| 4086 | AAGUGCUC G UCCUAAAU | 1010 | ATTTAGGA GGCTAGCTACAACGA GAGCACTT | 5807 |
| 4093 | CGUCCUAA A UCCGUCCG | 1011 | CGGACGGA GGCTAGCTACAACGA TTAGGACG | 5808 |
| 4097 | CUAAAUCC G UCCGUUAC | 1012 | GTAACGGA GGCTAGCTACAACGA GGATTTAG | 5809 |
| 4101 | AUCCGUCC G UUACCGCC | 1013 | GGCGGTAA GGCTAGCTACAACGA GGACGGAT | 5810 |
| 4104 | CGUCCGUU A CCGCCACC | 1014 | GGTGGCGG GGCTAGCTACAACGA AACGGACG | 5811 |
| 4107 | CCGUUACC G CCACCUUA | 1015 | TAAGGTGG GGCTAGCTACAACGA GGTAACGG | 5812 |
| 4110 | UUACCGCC A CCUUAGGG | 1016 | CCCTAAGG GGCTAGCTACAACGA GGCGGTAA | 5813 |
| 4118 | ACCUUAGG G UUUGGGGC | 1017 | GCCCCAAA GGCTAGCTACAACGA CCTAAGGT | 5814 |
| 4125 | GGUUUGGG G CGUAUAUG | 1018 | CATATACG GGCTAGCTACAACGA CCCAAACC | 5815 |
| 4127 | UUUGGGGC G UAUAUGUC | 1019 | GACATATA GGCTAGCTACAACGA GCCCCAAA | 5816 |
| 4129 | UGGGGCGU A UAUGUCUA | 1020 | TAGACATA GGCTAGCTACAACGA ACGCCCCA | 5817 |
| 4131 | GGGCGUAU A UGUCUAAG | 1021 | CTTAGACA GGCTAGCTACAACGA ATACGCCC | 5818 |
| 4133 | GCGUAUAU G UCUAAGGC | 1022 | GCCTTAGA GGCTAGCTACAACGA ATATACGC | 5819 |
| 4140 | UGUCUAAG G CACACGGU | 1023 | ACCGTGTG GGCTAGCTACAACGA CTTAGACA | 5820 |
| 4142 | UCUAAGGC A CACGGUGU | 1024 | ACACCGTG GGCTAGCTACAACGA GCCTTAGA | 5821 |
| 4144 | UAAGGCAC A CGGUGUCG | 1025 | CGACACCG GGCTAGCTACAACGA GTGCCTTA | 5822 |
| 4147 | GGCACACG G UGUCGAUC | 1026 | GATCGACA GGCTAGCTACAACGA CGTGTGCC | 5823 |
| 4149 | CACACGGU G UCGAUCCU | 1027 | AGGATCGA GGCTAGCTACAACGA ACCGTGTG | 5824 |
| 4153 | CGGUGUCG A UCCUAACA | 1028 | TGTTAGGA GGCTAGCTACAACGA CGACACCG | 5825 |
| 4159 | CGAUCCUA A CAUCAGAA | 1029 | TTCTGATG GGCTAGCTACAACGA TAGGATCG | 5826 |
| 4161 | AUCCUAAC A UCAGAACU | 1030 | AGTTCTGA GGCTAGCTACAACGA GTTAGGAT | 5827 |
| 4167 | ACAUCAGA A CUGGGGUA | 1031 | TACCCCAG GGCTAGCTACAACGA TCTGATGT | 5828 |
| 4173 | GAACUGGG G UAAGGACC | 1032 | GGTCCTTA GGCTAGCTACAACGA CCCAGTTC | 5829 |
| 4179 | GGGUAAGG A CCAUCACC | 1033 | GGTCATGG GGCTAGCTACAACGA CCTTACCC | 5830 |
| 4182 | UAAGGACC A UCACCACG | 1034 | CGTGGTGA GGCTAGCTACAACGA GGTCCTTA | 5831 |
| 4185 | GGACCAUC A CCACGGGC | 1035 | GCCCGTGG GGCTAGCTACAACGA GATGGTCC | 5832 |
| 4188 | CCAUCACC A CGGGCGCC | 1036 | GGCGCCCG GGCTAGCTACAACGA GGTGATGG | 5833 |
| 4192 | CACCACGG G CGCCCCGA | 1037 | TGGGGGCG GGCTAGCTACAACGA CCGTGGTG | 5834 |
| 4194 | CCACGGGC G CCCCCAUC | 1038 | CATGGGGG GGCTAGCTACAACGA GCCCGTGG | 5835 |
| 4200 | GCGCCCCC A UCACGUAC | 1039 | GTACGTGA GGCTAGCTACAACGA GGGGGCGC | 5836 |
| 4203 | CCCCCAUC A CGUACUCC | 1040 | GGAGTACG GGCTAGCTACAACGA GATGGGGG | 5837 |
| 4205 | CCCAUCAC G UACUCCAC | 1041 | GTGGAGTA GGCTAGCTACAACGA GTGATGGG | 5838 |
| 4207 | CAUCACGU A CUCCACCU | 1042 | AGGTGGAG GGCTAGCTACAACGA ACGTCATG | 5839 |
| 4212 | CGUACUCC A CCUAUGGC | 1043 | GCCATAGG GGCTAGCTACAACGA GGAGTACG | 5840 |
| 4216 | CUCCACCU A UGGCAAGU | 1044 | ACTTGCGA GGCTAGCTACAACGA AGGTGGAC | 5841 |
| 4219 | CACCUAUG G CAAGUUCC | 1045 | GGAACTTG GGCTAGCTACAACGA CATAGGTG | 5842 |
| 4223 | UAUGGCAA G UUCCUUGC | 1046 | GCAAGGAA GGCTAGCTACAACGA TTGCCATA | 5843 |
| 4230 | AGUUCCUU G CCGACGGU | 1047 | ACCGTCGG GGCTAGCTACAACGA AAGGAACT | 5844 |
| 4234 | CCUUGCCG A CGGUGGUU | 1048 | AACCACCG GGCTAGCTACAACGA CGGCAAGG | 5845 |
| 4237 | UGCCGACG G UGGUUGCU | 1049 | AGCAACGA GGCTAGCTACAACGA CGTCGGCA | 5846 |
| 4240 | CGACGGUG G UUGCUCUG | 1050 | CAGAGCAA GGCTAGCTACAACGA CACCGTCG | 5847 |
| 4243 | CGGUGGUU G CUCUGGGG | 1051 | CCCCAGAG GGCTAGCTACAACGA AACCACCG | 5848 |
| 4252 | CUCUGGGG G CGCCUAUG | 1052 | CATAGGCG GGCTAGCTACAACGA CCCCAGAG | 5849 |
| 4254 | CUGGGGGC G CCUAUGAC | 1053 | GTCATAGG GGCTAGCTACAACGA GCCCCCAG | 5850 |
| 4258 | GGGCGCCU A UGACAUCA | 1054 | TGATGTCA GGCTAGCTACAACGA AGGCGCCC | 5851 |
| 4261 | CGCCUAUG A CAUCAUAA | 1055 | TTATGATG GGCTAGCTACAACGA CATAGGCG | 5852 |
| 4263 | CCUAUGAC A UCAUAAUG | 1056 | CATTATGA GGCTAGCTACAACGA GTCATAGG | 5853 |
| 4266 | AUGACAUC A UAAUCUGU | 1057 | ACACATTA GGCTAGCTACAACGA GATGTCAT | 5854 |
| 4269 | ACAUCAUA A UGUGUGAU | 1058 | ATCACACA GGCTAGCTACAACGA TATGATGT | 5855 |
| 4271 | AUCAUAAU G UCUGAUGA | 1059 | TCATCACA GGCTAGCTACAACGA ATTATGAT | 5856 |
| 4273 | CAUAAUGU G UGAUGAGU | 1060 | ACTCATCA GGCTAGCTACAACGA ACATTATG | 5857 |
| 4276 | AAUGUGUG A UGAGUGCC | 1061 | GGCACTCA GGCTAGCTACAACGA CACACATT | 5858 |
| 4280 | UGUGAUGA G UGCCACUC | 1062 | GAGTGGCA GGCTAGCTACAACGA TCATCACA | 5859 |
| 4282 | UGAUCAGU G CCACUCAA | 1063 | TTGACTGG GGCTAGCTACAACGA ACTCATCA | 5860 |
| 4285 | UCAGUGCC A CUCAAUUG | 1064 | CAATTGAG GGCTAGCTACAACGA GGCACTCA | 5861 |
| 4290 | UCCACUCA A UUGACUCG | 1065 | CGAGTCAA GGCTAGCTACAACGA TGAGTCCC | 5862 |
| 4294 | CUCAAUUG A CUCGACUU | 1066 | AAGTCGAG GGCTAGCTACAACGA CAATTGAG | 5863 |
| 4299 | UUGACUCG A CUUCCAUU | 1067 | AATGGAAG GGCTAGCTACAACGA CCAGTCAA | 5864 |
| 4305 | CGACUUCC A UUUUGGGC | 1068 | GCCCAAAA GGCTAGCTACAACGA CGAAGTCG | 5865 |
| 4312 | CAUUUUGG G CAUCGGCA | 1069 | TGCCGATG GGCTAGCTACAACGA CCAAAATG | 5866 |
| 4314 | UUUUGGGC A UCGGCACA | 1070 | TGTGCCGA GGCTAGCTACAACGA GCCCAAAA | 5867 |
| 4318 | GGGCAUCG G CACAGUCC | 1071 | GGACTGTG GGCTAGCTACAACGA CGATGCCC | 5868 |
| 4320 | GCAUCGGC A CAGUCCUG | 1072 | CAGGACTC GGCTAGCTACAACGA GCCGATGC | 5869 |
| 4323 | UCGGCACA G UCCUGGAC | 1073 | GTCCAGGA GGCTAGCTACAACGA TGTCCCGA | 5870 |
| 4330 | AGUCCUGG A CCAAGCCC | 1074 | CCGCTTGG GGCTAGCTACAACGA CCAGGACT | 5871 |
| 4335 | UGGACCAA G CGGAGACG | 1075 | CGTCTCCG GGCTAGCTACAACGA TTGGTCCA | 5872 |
| 4341 | AAGCGGAG A CGGCUGGA | 1076 | TCCAGCCG GGCTAGCTACAACGA CTCCGCTT | 5873 |
| 4344 | CGGAGACG G CUGGAGCG | 1077 | CGCTCCAG GGCTAGCTACAACGA CGTCTCCG | 5874 |
| 4350 | CCGCUGCA G CGCGGCUC | 1078 | GAGCCGCG GGCTAGCTACAACGA TCCAGCCC | 5875 |
| 4352 | GCUGCAGC G CGGCUCGU | 1079 | ACGAGCCG GGCTAGCTACAACGA GCTCCAGC | 5876 |
| 4355 | GGAGCGCG G CUCGUCGU | 1080 | ACGACGAG GGCTAGCTACAACGA CGCGCTCC | 5877 |
| 4359 | CGCGGCUC G UCGUGCUC | 1081 | GAGCACGA GGCTAGCTACAACGA GAGCCGCG | 5878 |
| 4362 | GGCUCGUC G UGCUCGCC | 1082 | GGCGAGCA GGCTAGCTACAACGA GACGAGCC | 5879 |
| 4364 | CUCGUCGU G CUCGCCAC | 1083 | GTGGCGAG GGCTAGCTACAACGA ACGACGAG | 5880 |
| 4368 | UCGUGCUC G CCACCGCU | 1084 | AGCGGTGG GGCTAGCTACAACGA GAGGACCA | 5881 |
| 4371 | UGCUCGCC A CCGCUACG | 1085 | CGTAGCGG GGCTAGCTACAACGA GGCGAGCA | 5882 |
| 4374 | UCGCCACC G CUACGCCU | 1086 | AGGCGTAG GGCTAGCTACAACGA GGTGGCGA | 5883 |
| 4377 | CCACCGCU A CGCCUCCG | 1087 | CGGAGGCG GGCTAGCTACAACGA AGCGGTGG | 5884 |
| 4379 | ACCGCUAC G CCUCCGGG | 1088 | CCCGGAGG GGCTAGCTACAACGA GTAGCGGT | 5885 |
| 4388 | CCUCCGGG A UCGGUCAC | 1089 | GTGACCGA GGCTAGCTACAACGA CCCGGAGG | 5886 |
| 4392 | CGGGAUCG G UCACCGUG | 1090 | CACGGTGA GGCTAGCTACAACGA CGATCCCG | 5887 |
| 4395 | GAUCGGUC A CCGUGCCA | 1091 | TGGCACGG GGCTAGCTACAACGA GACCGATC | 5888 |
| 4398 | CGGUCACC G UGCCACAU | 1092 | ATGTGGCA GGCTAGCTACAACGA GGTGACCG | 5889 |
| 4400 | GUCACCCU G CCACAUCC | 1093 | GGATGTGG GGCTAGCTACAACGA ACGGTGAC | 5890 |
| 4403 | ACCGUGCC A CAUCCCAA | 1094 | TTGGGATG GGCTAGCTACAACGA GGCACGGT | 5891 |
| 4405 | CGUGCCAC A UCCCAACA | 1095 | TGTTGGGA GGCTAGCTACAACGA GTGGCACG | 5892 |
| 4411 | ACAUCCCA A CAUCGAGG | 1096 | CCTCGATG GGCTAGCTACAACGA TGGGATGT | 5893 |
| 4413 | AUCCCAAC A UCGAGGAG | 1097 | CTCCTCGA GGCTAGCTACAACGA GTTGGGAT | 5894 |
| 4422 | UCCAGGAG A UAGCCUUC | 1098 | CAACGCTA GGCTAGCTACAACGA CTCCTCGA | 5895 |
| 4425 | AGGAGAUA G CCUUGUCC | 1099 | GGACAAGG GGCTAGCTACAACGA TATCTCCT | 5896 |
| 4430 | AUAGCCUU G UCCAACAC | 1100 | GTGTTGGA GGCTAGCTACAACGA AAGGCTAT | 5897 |
| 4435 | CUUGUCCA A CACCGGAG | 1101 | CTCCGGTG GGCTAGCTACAACGA TGGACAAG | 5898 |
| 4437 | UGUCCAAC A CCGGAGAG | 1102 | CTCTCCGG GGCTAGCTACAACGA GTTGGACA | 5899 |
| 4446 | CCGGAGAG A UCCCCUUC | 1103 | GAAGGGGA GGCTAGCTACAACGA CTCTCCGG | 5900 |
| 4456 | CCCCUUCU A UGGCAAAG | 1104 | CTTTGCGA GGCTAGCTACAACGA ACAAGGCG | 5901 |
| 4459 | CUUCUAUC G CAAAGCGA | 1105 | TCCCTTTG GGCTAGCTACAACGA CATAGAAG | 5902 |
| 4464 | AUCCCAAA G CCAUCCCC | 1106 | GGGGATGG GGCTAGCTACAACGA TTTGCCAT | 5903 |
| 4467 | CCAAAGCC A UCCCCAUC | 1107 | CATCGCGA GGCTAGCTACAACGA GGCTTTCC | 5904 |
| 4473 | CCAUCCCC A UCGAGACC | 1108 | GGTCTCGA GGCTAGCTACAACGA GGGCATCC | 5905 |
| 4479 | CCAUCGAG A CCAUCAAA | 1109 | TTTGATGC GGCTAGCTACAACGA CTCGATGG | 5906 |
| 4482 | UCGAGACC A UCAAAGGG | 1110 | CCCTTTGA GGCTAGCTACAACGA GGTCTCGA | 5907 |
| 4496 | GGGCCCAC G CAUCUCAU | 1111 | ATCAGATG GGCTAGCTACAACGA CTCCCCCC | 5908 |
| 4498 | GGCGACGC A UCUCAUCU | 1112 | AGATCACA GGCTAGCTACAACGA GCCTCCCC | 5909 |
| 4503 | GCCAUCUC A UCUUCUCC | 1113 | GCAGAACA GGCTAGCTACAACGA GAGATGCC | 5910 |
| 4510 | CAUCUUCU G CCAUUCCA | 1114 | TCCAATGG GGCTAGCTACAACGA AGAAGATG | 5911 |
| 4513 | CUUCUGCC A UUCCAACA | 1115 | TCTTGGAA GGCTAGCTACAACGA GGCAGAAG | 5912 |
| 4526 | AAGAAGAA A UGUCACGA | 1116 | TCGTCACA GGCTAGCTACAACGA TTCTTCTT | 5913 |
| 4528 | CAAGAAAU G UGACGACC | 1117 | CCTCGTCA CCCTAGCTACAACGA ATTTCTTC | 5914 |
| 4531 | CAAAUGUC A CGAGCUCG | 1118 | CGAGCTCC CCCTAGCTACAACGA CACATTTC | 5915 |
| 4535 | UGUGACGA G CUCGCUGC | 1119 | CCAGCCAC GGCTAGCTACAACGA TCCTCACA | 5916 |
| 4539 | ACCACCUC G CUGCAAAG | 1120 | CTTTGCAC GGCTAGCTACAACGA CACCTCGT | 5917 |
| 4542 | ACCUCCCU G CAAAGCUC | 1121 | CACCTTTC GGCTAGCTACAACGA ACCCACCT | 5918 |
| 4547 | GCUGCAAA G CUGUCGGG | 1122 | CCCCACAC GGCTAGCTACAACGA TTTCCAGC | 5919 |
| 4550 | GCAAAGCU G UCGGCCCU | 1123 | AGCCCCGA GGCTAGCTACAACGA AGCTTTCC | 5920 |
| 4555 | GCUGUCCG G CCUCGCAC | 1124 | CTCCGACG GGCTAGCTACAACGA CCGACACC | 5921 |
| 4562 | CGCCUCGG A CUUAACCC | 1125 | GCGTTAAG GGCTAGCTACAACGA CCCACGCC | 5922 |
| 4567 | CGGACUUA A CGCUCUAG | 1126 | CTACAGCC CCCTAGCTACAACGA TAAGTCCG | 5923 |
| 4569 | GACUUAAC G CUCUACCC | 1127 | CCCTACAC CCCTAGCTACAACGA CTTAACTC | 5924 |
| 4572 | UUAACCCU G UACCCUAU | 1128 | ATACCCTA CCCTAGCTACAACGA ACCCTTAA | 5925 |
| 4575 | ACCCUCUA G CCUAUUAC | 1129 | CTAATACC CCCTAGCTACAACGA TACACCCT | 5926 |
| 4577 | CCUCUACC G UAUUACCC | 1130 | CGCTAATA CCCTAGCTACAACGA CCTACACC | 5927 |
| 4579 | UCUACCCU A UUACCCCC | 1131 | CCCCCTAA CCCTAGCTACAACGA ACCCTACA | 5928 |
| 4582 | ACCCUAUU A CCCCCCUC | 1132 | CACCCCCC GGCTAGCTACAACGA AATACCCT | 5929 |
| 4588 | UUACCCCG G UCUCCACC | 1133 | CCTCCACA CCCTAGCTACAACGA CCCCCTAA | 5930 |
| 4594 | CCCUCUCC A CGUCUCCC | 1134 | CCGACACC GGCTAGCTACAACGA CCACACCC | 5931 |
| 4596 | CUCUCCAC G UCUCCGUC | 1135 | GACCCACA GGCTAGCTACAACGA CTCGACAC | 5932 |
| 4598 | CUCCACCU G UCCCUCAU | 1136 | ATCACCGA CCCTAGCTACAACGA ACCTCCAC | 5933 |
| 4602 | ACGUGUCC G UCAUACCG | 1137 | CGGTATGA GGCTAGCTACAACGA GGACACGT | 5934 |
| 4605 | UGUCCGUC A UACCGGCC | 1138 | GGCCGGTA GGCTAGCTACAACGA GACGGACA | 5935 |
| 4607 | UCCGUCAU A CCGGCCAG | 1139 | CTGGCCGG GGCTAGCTACAACGA ATGACGGA | 5936 |
| 4611 | UCAUACCG G CCAGCGGG | 1140 | CCCGCTGG GGCTAGCTACAACGA CGGTATGA | 5937 |
| 4615 | ACCGGCGA G CGGGGACG | 1141 | CGTCCCCG GGCTAGCTACAACGA TGGCCGGT | 5938 |
| 4621 | CAGCGGGG A CGUCGUUC | 1142 | CAACGACG GGCTAGCTACAACGA CCCCGCTG | 5939 |
| 4623 | GCGGGGAC G UCGUUGUC | 1143 | GACAACGA GGCTAGCTACAACGA GTCCCCGC | 5940 |
| 4626 | GGGACGAC G UUGUCGUG | 1144 | CACGACAA GGCTAGCTACAACGA GACGTCCC | 5941 |
| 4629 | ACGUCGUU G UCGUGGCA | 1145 | TGCCACGA GGCTAGCTACAACGA AACGACGT | 5942 |
| 4632 | UCGUUGUC G UGGCAACA | 1146 | TGTTGCGA GGCTAGCTACAACGA GACAACGA | 5943 |
| 4635 | UUGUCGUG G CAACAGAC | 1147 | GTCTGTTG GGCTAGCTACAACGA CACGACAA | 5944 |
| 4638 | UCGUGGCA A CAGACGCU | 1148 | AGCGTCTG GGCTAGCTACAACGA TGCCACGA | 5945 |
| 4642 | GGCAACAG A CGCUCUAA | 1149 | TTAGAGCG GGCTAGCTACAACGA CTGTTGCC | 5946 |
| 4644 | CAACAGAC G CUCUAAUG | 1150 | CATTAGAG GGCTAGCTACAACGA GTCTGTTG | 5947 |
| 4650 | ACGCUCUA A UGACGGGC | 1151 | GCCCGTCA GGCTAGCTACAACGA TAGAGCGT | 5948 |
| 4653 | CUCUAAUG A CGGGCUAU | 1152 | ATAGCCCG GGCTAGCTACAACGA CATTAGAG | 5949 |
| 4657 | AAUGACGG G CUAUACCG | 1153 | CGGTATAG GGCTAGCTACAACGA CCGTCATT | 5950 |
| 4660 | GACGGGCU A UACCGGCG | 1154 | CGCCGGTA GGCTAGCTACAACGA AGCCCGTC | 5951 |
| 4662 | CGGGCUAU A CCGGCGAU | 1155 | ATCGCCGG GGCTAGCTACAACGA ATAGCCCG | 5952 |
| 4666 | CUAUACCG G CGAUUUUG | 1156 | CAAAATCG GGCTAGCTACAACGA CGGTATAG | 5953 |
| 4669 | UACCGGCG A UUUUGACU | 1157 | AGTCAAAA GGCTAGCTACAACGA CGCCGGTA | 5954 |
| 4675 | CGAUUUUG A CUCGGUGA | 1158 | TCACCGAG GGCTAGCTACAACGA CAAAATCG | 5955 |
| 4680 | UUGACUCG G UGAUCGAC | 1159 | GTCGATCA GGCTAGCTACAACGA CGAGTCAA | 5956 |
| 4683 | ACUCGGUG A UCGACUGU | 1160 | ACAGTCGA GGCTAGCTACAACGA CACCGAGT | 5957 |
| 4687 | GGUGAUCG A CUGUAAUA | 1161 | TATTACAG GGCTAGCTACAACGA CGATCACC | 5958 |
| 4690 | GAUCGACU G UAAUACAU | 1162 | ATGTATTA GGCTAGCTACAACGA AGTCGATC | 5959 |
| 4693 | CGACUGUA A UACAUGUG | 1163 | CACATGTA GGCTAGCTACAACGA TACAGTCG | 5960 |
| 4695 | ACUGUAAU A CAUGUGUC | 1164 | GACACATG GGCTAGCTACAACGA ATTACAGT | 5961 |
| 4697 | UGUAAUAC A UGUGUCAC | 1165 | GTGACACA GGCTAGCTACAACGA GTATTACA | 5962 |
| 4699 | UAAUACAU G UGUCACCC | 1166 | GGGTGACA GGCTAGCTACAACGA ATGTATTA | 5963 |
| 4701 | AUACAUGU G UCACCCAA | 1167 | TTGGGTGA GGCTAGCTACAACGA ACATGTAT | 5964 |
| 4704 | CAUGUGUC A CCCAAACA | 1168 | TGTTTGGG GGCTAGCTACAACGA GACACATG | 5965 |
| 4710 | UCACCCAA A CAGUCGAC | 1169 | GTCGACTG GGCTAGCTACAACGA TTGGGTGA | 5966 |
| 4713 | CCCAAACA G UCGACUUC | 1170 | GAAGTCGA GGCTAGCTACAACGA TGTTTGGG | 5967 |
| 4717 | AACAGUCG A CUUCAGCU | 1171 | AGCTGAAG GGCTAGCTACAACGA CGACTGTT | 5968 |
| 4723 | CGACUUCA G CUUGGACC | 1172 | GGTCCAAG GGCTAGCTACAACGA TGAAGTCG | 5969 |
| 4729 | CAGCUUGG A CCCUACCU | 1173 | AGGTAGGG GGCTAGCTACAACGA CCAAGCTG | 5970 |
| 4734 | UGGACCCU A CCUUCACC | 1174 | GGTGAAGG GGCTAGCTACAACGA AGGGTCCA | 5971 |
| 4740 | CUACCUUC A CCAUUGAG | 1175 | CTCAATGG GGCTAGCTACAACGA GAAGGTAG | 5972 |
| 4743 | CCUUCACC A UUGAGACG | 1176 | CGTCTCAA GGCTAGCTACAACGA GGTGAAGG | 5973 |
| 4749 | CCAUUGAG A CGACGACC | 1177 | GGTCGTCG GGCTAGCTACAACGA CTCAATGG | 5974 |
| 4752 | UUGAGACG A CGACCGUG | 1178 | CACGGTCG GGCTAGCTACAACGA CGTCTCAA | 5975 |
| 4755 | AGACGACG A CCGUGCCC | 1179 | GGCCACGG GGCTAGCTACAACGA CGTCGTCT | 5976 |
| 4758 | CGACGACC G UGCCCCAA | 1180 | TTGGGGCA GGCTAGCTACAACGA GGTCGTCG | 5977 |
| 4760 | ACGACCGU G CCCCAAGA | 1181 | TCTTGGGG GGCTAGCTACAACGA ACGGTCGT | 5978 |
| 4768 | GCCCCAAG A CGCAGUGU | 1182 | ACACTGCG GGCTAGCTACAACGA CTTGGGGC | 5979 |
| 4770 | CCCAAGAC G CAGUGUCC | 1183 | GGACACTG GGCTAGCTACAACGA GTCTTGGG | 5980 |
| 4773 | AAGACGCA G UGUCCCGC | 1184 | GCGGGACA GGCTAGCTACAACGA TGCGTCTT | 5981 |
| 4775 | GACGCAGU G UCCCGCUC | 1185 | GAGCGGGA GGCTAGCTACAACGA ACTGCGTC | 5982 |
| 4780 | AGUGUCCC G CUCGCAGA | 1186 | TCTGCGAG GGCTAGCTACAACGA GGGACACT | 5983 |
| 4784 | UCCCGCUC G CAGAGGCG | 1187 | CGCCTCTG GGCTAGCTACAACGA CAGCGGGA | 5984 |
| 4790 | UCGCAGAG G CGAGGUAG | 1188 | CTACCTCG GGCTAGCTACAACGA CTCTGCGA | 5985 |
| 4795 | GAGGCGAG G UAGGACCG | 1189 | CGGTCCTA GGCTAGCTACAACGA CTCGCCTC | 5986 |
| 4800 | CAGGUACC A CCGGUAGG | 1190 | CCTACCGC GGCTAGCTACAACGA CCTACCTC | 5987 |
| 4804 | UAGGACCG G UAGGGGCA | 1191 | TGCCCCTA GGCTAGCTACAACGA CGGTCCTA | 5988 |
| 4810 | CGGUAGGG G CAGGAGAG | 1192 | CTCTCCTG GGCTAGCTACAACGA CCCTACCG | 5989 |
| 4819 | CAGGAGAG G CAGAGACA | 1193 | TGTATATG GGCTAGCTACAACGA CTCTCCTG | 5990 |
| 4821 | GGAGAGGC A UAUACAGG | 1194 | CCTGTATA GGCTAGCTACAACGA GCCTCTCC | 5991 |
| 4823 | AGAGGCAU A UACAGGUU | 1195 | AACCTGTA GGCTAGCTACAACGA ATGCCTCT | 5992 |
| 4825 | AGGCAUAU A CAGGUUUG | 1196 | CAAACCTG GGCTAGCTACAACGA ATATGCCT | 5993 |
| 4829 | AUAUACAG G UUUCUGAC | 1197 | CTCACAAA QCCTAGCTACAACGA CTGTATAT | 5994 |
| 4833 | ACAGGUUU G UGACUCCA | 1198 | TGGAGTCA GGCTAGCTACAACGA AAACCTGT | 5995 |
| 4836 | GGUUUGUG A CUCCAGGA | 1199 | TCCTGGAG GGCTAGCTACAACGA CACAAACC | 5996 |
| 4847 | CCAGGAGA G CGGCCUUC | 1200 | GAAGGCCG GGCTAGCTACAACGA TCTCCTCG | 5997 |
| 4850 | GGAGAGCG G CCUUCGGG | 1201 | CCCGAAGG GGCTAGCTACAACGA CGCTCTCC | 5998 |
| 4858 | GCCUUCGG G CAUGUUCG | 1202 | CGAACATG GGCTAGCTACAACGA CCGAAGGC | 5999 |
| 4860 | CUUCGGGC A UGUUCGAC | 1203 | GTCGAACA GGCTAGCTACAACGA GCCCGAAG | 6000 |
| 4862 | UCGGGCAU G UUCGACUC | 1204 | GAGTCGAA GGCTAGCTACAACGA ATGCCCGA | 6001 |
| 4867 | CAUGUUCG A CUCCUCGG | 1205 | CCGAGGAG GGCTAGCTACAACGA CGAACATG | 6002 |
| 4875 | ACUCCUCG G UCCUGUGU | 1206 | ACACAGGA GGCTAGCTACAACGA CGAGCAGT | 6003 |
| 4880 | UCGGUCCU G UGUGAGUG | 1207 | CACTCACA GGCTAGCTACAACGA AGGACCGA | 6004 |
| 4882 | GGUCCUGU G UGAGUGCU | 1208 | AGCACTCA GGCTAGCTACAACGA ACAGGACC | 6005 |
| 4886 | CUGUGUGA G UGCUAUGA | 1209 | TCATAGCA GGCTAGCTACAACGA TCACACAG | 6006 |
| 4888 | GUGUGAGU G CUAUGACG | 1210 | CGTCATAG GGCTAGCTACAACGA ACTCACAC | 6007 |
| 4891 | UGAGUGCU A UGACGCGG | 1211 | CCGCGTCA GGCTAGCTACAACGA AGCACTCA | 6008 |
| 4894 | GUGCUAUG A CGCGGGAU | 1212 | ATCCCGCG GGCTAGCTACAACGA CATACCAC | 6009 |
| 4896 | GCUAUGAC G CGGGAUGU | 1213 | ACATCCCG GGCTAGCTACAACGA GTCATAGC | 6010 |
| 4901 | GACGCGGG A UGUGCUUG | 1214 | CAAGCACA GGCTAGCTACAACGA CCCGCGTC | 6011 |
| 4903 | CGCGGGAU G UGCUUGGU | 1215 | ACCAAGCA GGCTAGCTACAACGA ATCCCGCG | 6012 |
| 4905 | CGGGAUGU G CUUGGUAC | 1216 | GTACCAAG GGCTAGCTACAACGA ACATCCCG | 6013 |
| 4910 | UGUGCUUG G UACCACCU | 1217 | AGCTCGTA GGCTAGCTACAACGA CAAGCACA | 6014 |
| 4912 | UGCUUGGU A CGAGCUCA | 1218 | TGAGCTCG GGCTAGCTACAACGA ACCAAGCA | 6015 |
| 4916 | UGGUACGA G CUCACGCC | 1219 | GGCGTGAG GGCTAGCTACAACGA TCCTACCA | 6016 |
| 4920 | ACCACCUC A CGCCCGCC | 1220 | GGCGGGCG GGCTAGCTACAACGA GAGCTCGT | 6017 |
| 4922 | CACCUCAC G CCCGCCGA | 1221 | TCCGCCCC GGCTAGCTACAACGA CTGAGCTC | 6018 |
| 4926 | UCACGCCC G CCGAGACC | 1222 | GCTCTCGG GGCTAGCTACAACGA GGGCGTGA | 6019 |
| 4932 | CCCCCGAG A CCUCCCUU | 1223 | AACGGAGC GGCTAGCTACAACGA CTCCGCGC | 6020 |
| 4938 | AGACCUCC G UUACGUUG | 1224 | CAACCTAA GGCTAGCTACAACGA GGACCTCT | 6021 |
| 4943 | UCCGUUAG G UUGCGGGC | 1225 | GCCCGCAA GGCTAGCTACAACGA CTAACGCA | 6022 |
| 4946 | GUUAGCUU G CCGGCUUA | 1226 | TAAGCCCC GGCTAGCTACAACGA AACCTAAC | 6023 |
| 4950 | CGUUGCGC G CUUACCUA | 1227 | TAGCTAAG GGCTAGCTACAACGA CCGCAACC | 6024 |
| 4954 | CCGGCCUU A CCUAAAUA | 1228 | TATTTACG GGCTAGCTACAACGA AAGCCCGC | 6025 |
| 4960 | UUACCUAA A UACACCAG | 1229 | CTGGTGTA GGCTAGCTACAACGA TTAGGTAA | 6026 |
| 4962 | ACCUAAAU A CACCACGG | 1230 | CCCTGCTC GGCTAGCTACAACGA ATTTAGCT | 6027 |
| 4964 | CUAAAUAC A CCAGCCUU | 1231 | AACCCTGG GGCTAGCTACAACGA CTATTTAG | 6028 |
| 4970 | ACACCAGG G UUCCCCUU | 1232 | AACGGCAA GGCTAGCTACAACGA CCTCCTGT | 6029 |
| 4973 | CCACGCUU G CCCUUCUC | 1233 | CAGAAGGG GGCTAGCTACAACGA AACCCTCG | 6030 |
| 4981 | GCCCUUCU G CCACCACC | 1234 | GGTCCTCG GGCTAGCTACAACGA AGAAGGGC | 6031 |
| 4987 | CUGCCAGC A CCAUCUGC | 1235 | CCAGATGC GGCTAGCTACAACGA CCTCCCAG | 6032 |
| 4990 | CCACGACC A UCUCGAGU | 1236 | ACTCCAGA GGCTAGCTACAACGA CGTCCTCG | 6033 |
| 4997 | CAUCUCGA G UUCUGGGA | 1237 | TCCCAGAA GGCTAGCTACAACGA TCCACATC | 6034 |
| 5008 | CUCGGAGC G UCUCUUCA | 1238 | TGAACACA GGCTAGCTACAACGA CCTCCCAG | 6035 |
| 5010 | CCCACCCU G UCUUCACA | 1239 | TCTCAAGA GGCTAGCTACAACGA ACCCTCCC | 6036 |
| 5016 | CUGUCUUC A CACCCCUC | 1240 | CACCCCTC GGCTAGCTACAACGA CAACACAC | 6037 |
| 5020 | CUUCACAG G CCUCACCC | 1241 | CCCTCACC GGCTAGCTACAACGA CTCTCAAC | 6038 |
| 5025 | CACCCCUC A CCCACAUA | 1242 | TATGTCCC GGCTAGCTACAACGA CACCCCTC | 6039 |
| 5029 | CCUCACCC A CAUACAUC | 1243 | CATCTATG GGCTAGCTACAACGA CCCTCACC | 6040 |
| 5031 | UCACCCAC A UAGAUGCC | 1244 | CCCATCTA GGCTAGCTACAACGA GTGCCTGA | 6041 |
| 5035 | CCACAUAC A UCCCCACU | 1245 | AGTCGGCA GGCTAGCTACAACGA CTATGTGG | 6042 |
| 5037 | ACAUACAU G CCCACUUC | 1246 | CAACTCCC GGCTAGCTACAACGA ATCTATCT | 6043 |
| 5041 | ACAUCCCC A CUUCUUGU | 1247 | ACAACAAC GGCTAGCTACAACGA CCCCATCT | 6044 |
| 5048 | CACUUCUU G UCCCACAC | 1248 | CTCTCCGA GGCTAGCTACAACGA AACAACTC | 6045 |
| 5055 | UCUCCCAG A CCAACCAC | 1249 | CTCCTTCC GGCTAGCTACAACGA CTCCGACA | 6046 |
| 5060 | CACACCAA G CACCCACC | 1250 | CCTCCCTC GGCTAGCTACAACGA TTGCTCTC | 6047 |
| 5064 | CCAAGCAG G CAGGAGAA | 1251 | TTCTCCTG GGCTAGCTACAACGA CTGCTTGG | 6048 |
| 5074 | AGGAGAAA A CCUCCCCU | 1252 | AGGGGAGG GGCTAGCTACAACGA TTTCTCCT | 6049 |
| 5083 | CCUCCCCU A CCUGGUAG | 1253 | CTACCAGG GGCTAGCTACAACGA AGGGGAGG | 6050 |
| 5088 | CCUACCUG G UAGCAUAC | 1254 | GTATGCTA GGCTAGCTACAACGA CAGGTAGG | 6051 |
| 5091 | ACCUGGGA G CAUACCAA | 1255 | TTGGTATG GGCTAGCTACAACGA TACCAGGT | 6052 |
| 5093 | CUGGUAGC A UACCAAGC | 1256 | GCTTGGTA GGCTAGCTACAACGA GCTACCAG | 6053 |
| 5095 | GGUAGCAU A CCAAGCGA | 1257 | TGGCTTGG GGCTAGCTACAACGA ATGCTACC | 6054 |
| 5100 | CAUACCAA G CCACAGUG | 1258 | CACTGTGG GGCTAGCTACAACGA TTGGTATG | 6055 |
| 5103 | ACCAAGCC A CAGUGUGC | 1259 | GCACACTG GGCTAGCTACAACGA GGCTTGGT | 6056 |
| 5106 | AAGCCACA G UGUGCGCC | 1260 | GGCGCACA GGCTAGCTACAACGA TGTCGCTT | 6057 |
| 5108 | GCCACAGU G UCCUCCAC | 1261 | CTGCCCGA GGCTAGCTACAACGA ACTGTGGC | 6058 |
| 5110 | CACAGUGU G CGCCAGCG | 1262 | CCCTGGCG GGCTAGCTACAACGA ACACTGTG | 6059 |
| 5112 | CAGUGUGC G CCAGGGCU | 1263 | AGCCCTGG GGCTAGCTACAACGA CCACACTG | 6060 |
| 5118 | GCCCCACC G CUCACCCU | 1264 | AGCCTGAG CCCTAGCTACAACGA CCTCGCCC | 6061 |
| 5124 | CCGCUCAG G CUCCACCC | 1265 | CCCTCGAG GGCTAGCTACAACGA CTCACCCC | 6062 |
| 5129 | CAGGCUCC A CCCCCAUC | 1266 | GATCCGCC GGCTAGCTACAACGA GCAGCCTG | 6063 |
| 5135 | CCACCCCC A UCGUGGGA | 1267 | TCCCACGA GGCTAGCTACAACGA CCCGGTGG | 6064 |
| 5138 | CCCCCAUC G UCCCAUCA | 1268 | TCATCCGA GGCTAGCTACAACGA CATGGGGG | 6065 |
| 5143 | AUCCUCGC A UCAAAUCU | 1269 | ACATTTCA CCCTAGCTACAACGA CCCACGAT | 6066 |
| 5148 | GGGAUCAA A UGUGCAAC | 1270 | CTTCCACA GGCTAGCTACAACGA TTGATCCC | 6067 |
| 5150 | GAUCAAAU G UGGAACUG | 1271 | CACTTCGA GGCTAGCTACAACGA ATTTGATC | 6068 |
| 5156 | AUCUGGAA G UCUCUCAC | 1272 | GTCACACA GGCTAGCTACAACGA TTCCACAT | 6069 |
| 5158 | GUGGAAGU G UCUCACAC | 1273 | CTGTGAGA GGCTAGCTACAACGA ACTTCCAC | 6070 |
| 5163 | AGUGUCUC A CACGGCUA | 1274 | TAGCCCTG GGCTAGCTACAACGA CAGACACT | 6071 |
| 5165 | UGUCUCAC A CGCCUAAA | 1275 | TTTAGCCG GGCTAGCTACAACGA GTGAGACA | 6072 |
| 5168 | CUCACACG G CUAAAGCC | 1276 | GGCTTTAG GGCTAGCTACAACGA CGTGTGAG | 6073 |
| 5174 | CGGCUAAA G CCUACGCU | 1277 | AGCGTAGG GGCTAGCTACAACGA TTTAGCCG | 6074 |
| 5178 | UAAACCCU A CGCUACAC | 1278 | CTGTAGCG GGCTAGCTACAACGA AGCCTTTA | 6075 |
| 5180 | AAGCCUAC G CUACACCG | 1279 | CCCTGTAC GGCTAGCTACAACGA CTACCCTT | 6076 |
| 5183 | CCUACGCU A CACGGGCC | 1280 | GCCCCCTC GGCTAGCTACAACGA AGCGTACC | 6077 |
| 5185 | UACCCUAC A CGCCCCAA | 1281 | TTGCCCCC GGCTAGCTACAACGA CTACCGTA | 6078 |
| 5189 | CUACACCG G CCAACACC | 1282 | CGTGTTGG GGCTAGCTACAACGA CCCTGTAC | 6079 |
| 5193 | ACCCGCCA A CACCCCUG | 1283 | CACGGGTG GGCTAGCTACAACGA TCCCCCGT | 6080 |
| 5195 | GGCCCAAC A CCCCUGCU | 1284 | ACCACCCC GGCTAGCTACAACGA GTTCCCCC | 6081 |
| 5201 | ACACCCCU G CUCUAUAC | 1285 | CTATACAC CCCTAGCTACAACGA ACCCCTCT | 6082 |
| 5204 | CCCCUCCU G UAUACGCU | 1286 | ACCCTATA CCCTAGCTACAACGA ACCACCCC | 6083 |
| 5206 | CCUCCUCU A UACCCUAC | 1287 | CTACCCTA CCCTAGCTACAACGA ACACCACC | 6084 |
| 5210 | CUCUAUAC G CUACCACC | 1288 | CCTCCTAC CCCTAGCTACAACGA CTATACAC | 6085 |
| 5217 | CCCUACGA G CCCUCCAA | 1289 | TTCCACCC CCCTAGCTACAACGA TCCTACCC | 6086 |
| 5220 | UACCAGCC G UCCAAAAU | 1290 | ATTTTGGA GGCTAGCTACAACGA CCCTCCTA | 6087 |
| 5227 | CCUCCAAA A UCAUCUCA | 1291 | TCACATCA GGCTAGCTACAACGA TTTGCACC | 6088 |
| 5230 | CCAAAAUC A UCUCACCC | 1292 | CCGTGACA GGCTAGCTACAACGA CATTTTCC | 6089 |
| 5232 | AAAAUCAU G UCACCCUC | 1293 | CACCCTCA CCCTAGCTACAACGA ATCATTTT | 6090 |
| 5235 | AUCAUCUC A CCCUCACA | 1294 | TCTCACCC CCCTAGCTACAACGA CACATCAT | 6091 |
| 5241 | UCACCCUC A CACACCCC | 1295 | CCGCTCTC CCCTAGCTACAACGA CACCCTCA | 6092 |
| 5243 | ACCCUCAC A CACCCCAU | 1296 | ATCCCCTC GGCTAGCTACAACGA CTCACCCT | 6093 |
| 5245 | CCUCACAC A CCCCAUAA | 1297 | TTATCCCC CCCTAGCTACAACGA CTCTGACG | 6094 |
| 5250 | CACACCCC A UAACCAAA | 1298 | TTTCCTTA CCCTAGCTACAACGA CCCCTCTC | 6095 |
| 5253 | ACCCCAUA A CCAAAUAC | 1299 | CTATTTCC CCCTAGCTACAACGA TATCGCCT | 6096 |
| 5258 | AUAACCAA A UACAUCAU | 1300 | ATCATCTA CCCTAGCTACAACGA TTGCTTAT | 6097 |
| 5260 | AACCAAAU A CAUCAUGA | 1301 | TCATCATC CCCTAGCTACAACGA ATTTCCTT | 6098 |
| 5262 | CCAAAUAC A UCAUGACA | 1302 | TCTCATCA CCCTAGCTACAACGA GTATTTCC | 6099 |
| 5265 | AAUACAUC A UCACAUGC | 1303 | CCATCTCA CCCTAGCTACAACGA GATGTATT | 6100 |
| 5268 | ACAUCAUC A CAUCCAUG | 1304 | CATCCATC CCCTAGCTACAACGA CATCATCT | 6101 |
| 5270 | AUCAUCAC A UGCAUGUC | 1305 | CACATCGA CCCTAGCTACAACGA GTCATGAT | 6102 |
| 5272 | CAUCACAU G CAUCUCGG | 1306 | CCGACATG CCCTAGCTACAACGA ATGTCATG | 6103 |
| 5274 | UCACAUCC A UGUCGGCU | 1307 | ACCCCACA CCCTAGCTACAACGA CCATCTCA | 6104 |
| 5276 | ACAUGCAU G UCGGCUGA | 1308 | TCAGCCGA GGCTAGCTACAACGA ATGCATGT | 6105 |
| 5280 | GCAUGUCG G CUGACCUG | 1309 | CAGGTCAG GGCTAGCTACAACGA CGACATGC | 6106 |
| 5284 | GUCGGCUG A CCUGGAGG | 1310 | CCTCCAGG GGCTAGCTACAACGA CAGCCGAC | 6107 |
| 5292 | ACCUGGAG G UCGUCACC | 1311 | GGTGACGA GGCTAGCTACAACGA CTCCAGGT | 6108 |
| 5295 | UGGAGGUC G UCACCAGC | 1312 | GCTGGTGA GGCTAGCTACAACGA GACCTCCA | 6109 |
| 5298 | AGGUCCUC A CCAGCACC | 1313 | GGTGCTGG GGCTAGCTACAACGA GACGACCT | 6110 |
| 5302 | CGUCACGA G CACCUGGG | 1314 | CCCAGGTG GGCTAGCTACAACGA TGGTGACG | 6111 |
| 5304 | UCACCAGC A CCUGGGUG | 1315 | CACCCAGG GGCTAGCTACAACGA GCTGGTGA | 6112 |
| 5310 | GCACCUGG G UGCUAGUA | 1316 | TACTAGCA GGCTAGCTACAACGA CCAGGTGC | 6113 |
| 5312 | ACCUGGGU G CUAGUAGG | 1317 | CCTACTAG GGCTAGCTACAACGA ACCCAGGT | 6114 |
| 5316 | GGGUGCUA G UAGGUGGC | 1318 | GCCACCTA GGCTAGCTACAACGA TAGCACCC | 6115 |
| 5320 | GCUAGUAG G UGGCGUCC | 1319 | GGACGCGA GGCTAGCTACAACGA CTACTAGC | 6116 |
| 5323 | AGUAGGUG G CGUCCUGG | 1320 | CCAGGACG GGCTAGCTACAACGA CACCTACT | 6117 |
| 5325 | UAGGUGGC G UCCUGGCA | 1321 | TGCCAGGA GGCTAGCTACAACGA GCCACCTA | 6118 |
| 5331 | GCGUCCUG G CAGCUCUG | 1322 | CAGAGCTG GGCTAGCTACAACGA CAGGACGC | 6119 |
| 5334 | UCCUGUCA G CUCUGACC | 1323 | GGTCAGAG GGCTAGCTACAACGA TGCCACGA | 6120 |
| 5340 | CAGCUCUG A CCGCGUAU | 1324 | ATACGCGG GGCTAGCTACAACGA CAGAGCTG | 6121 |
| 5343 | CUCUGACC G CGUAUUGC | 1325 | GCAATACG GGCTAGCTACAACGA GGTCAGAG | 6122 |
| 5345 | CUGACCGC G UAUUGCCU | 1326 | AGGCAATA GGCTAGCTACAACGA GCGGTCAC | 6123 |
| 5347 | GACCGCGU A UUGCCUGA | 1327 | TCAGGCAA GGCTAGCTACAACGA ACGCGGTC | 6124 |
| 5350 | CGCGUAUU G CCUGACGA | 1328 | TCGTCAGG GGCTAGCTACAACGA AATACGCG | 6125 |
| 5355 | AUUGCCUG A CGACAGGC | 1329 | GCCTGTCG GGCTAGCTACAACGA CAGGCAAT | 6126 |
| 5358 | GCCUGACG A CAGGCAGC | 1330 | GCTGCCTG GGCTAGCTACAACGA CGTCAGGC | 6127 |
| 5362 | GACGACAG G CAGCGUGG | 1331 | CCACGCTG GGCTAGCTACAACGA CTGTCGTC | 6128 |
| 5365 | GACAGGCA G CGUGGUCA | 1332 | TGACCACG GGCTAGCTACAACGA TGCCTGTC | 6129 |
| 5367 | CAGCCAGC G UGGUCAUU | 1333 | AATGACGA GGCTAGCTACAACGA CCTGCCTG | 6130 |
| 5370 | GCAGCGUG G UCAUGGUG | 1334 | CACAATGA GGCTAGCTACAACGA CACGCTGC | 6131 |
| 5373 | GCGUGGUC A UUGUGGGC | 1335 | GCCCACAA GGCTAGCTACAACGA GACCACCC | 6132 |
| 5376 | UGGUCAUU G UGGGCAGA | 1336 | TCTGCCGA GGCTAGCTACAACGA AATGACCA | 6133 |
| 5380 | CAUUGUGG G CAGAAUCA | 1337 | TGATTCTG GGCTAGCTACAACGA CCACAATG | 6134 |
| 5385 | UGGGCAGA A UCAUCUUG | 1338 | CAAGATGA GGCTAGCTACAACGA TCTGCCCA | 6135 |
| 5368 | GCAGAAUC A UCUUGUCC | 1339 | GGACAAGA GGCTAGCTACAACGA GATTCTCC | 6136 |
| 5393 | AUCAUCUU G UCCGGGAA | 1340 | TTCCCGGA GGCTAGCTACAACGA AAGATGAT | 6137 |
| 5402 | UCCGGGAA G CCGGCUGU | 1341 | ACAGCCCG GGCTAGCTACAACGA TTCCCGGA | 6138 |
| 5406 | GGAAGCCG G CUGUUAUC | 1342 | GATAACAG GGCTAGCTACAACGA CGCCTTCC | 6139 |
| 5409 | AGCCGGCU G UUAUCCCC | 1343 | GGGGATAA GGCTAGCTACAACGA AGCCGGCT | 6140 |
| 5412 | CGGCUGUU A UCCCCGAC | 1344 | GTCGCCGA GGCTAGCTACAACGA AACAGCCG | 6141 |
| 5419 | UAUCCCCG A CAGGGAGG | 1345 | CCTCCCTG GGCTAGCTACAACGA CGGGGATA | 6142 |
| 5427 | ACAGGGAG G CUCUCUAC | 1346 | GTACAGAG GGCTAGCTACAACGA CTCCCTGT | 6143 |
| 5434 | GGCUCUCU A CCAGGAGU | 1347 | ACTCCTGG GGCTAGCTACAACGA AGAGAGCC | 6144 |
| 5441 | UACCAGGA G UUCGAUCA | 1348 | TCATCCAA GGCTAGCTACAACGA TCCTGCTA | 6145 |
| 5446 | CCACUUCC A UCACAUCC | 1349 | CCATCTCA CCCTAGCTACAACGA CCAACTCC | 6146 |
| 5451 | UCCAUCAG A UCCACCAC | 1350 | CTCCTCGA CCCTAGCTACAACGA CTCATCCA | 6147 |
| 5459 | AUGGACGA G UCUGCCUC | 1351 | CACCCACA GGCTAGCTACAACGA TCCTCCAT | 6148 |
| 5461 | CCACCACU G UGCCUCAC | 1352 | CTGACCGA GGCTAGCTACAACGA ACTCCTCC | 6149 |
| 5463 | ACCAGUCU G CCUCACAC | 1353 | CTCTCACC GGCTAGCTACAACGA ACACTCCT | 6150 |
| 5468 | UCUCCCUC A CACCUCCC | 1354 | GCCACCTG GGCTAGCTACAACGA CAGCCACA | 6151 |
| 5470 | UCCCUCAC A CCUCCCUU | 1355 | AACCCACC GGCTAGCTACAACGA CTCACCCA | 6152 |
| 5479 | CCUCCCUU A CAUCCAAC | 1356 | CTTCCATC CCCTAGCTACAACGA AACCCAGC | 6153 |
| 5481 | UCCCUUAC A UCGAACAG | 1357 | CTGTTCGA GGCTAGCTACAACGA GTAAGGGA | 6154 |
| 5486 | UACAUCCA A CACGCGAU | 1358 | ATCCCCTC GGCTAGCTACAACGA TCCATCTA | 6155 |
| 5493 | AACAGGGG A UCCACCUC | 1359 | GAGCTCGA GGCTAGCTACAACGA CCCCTCTT | 6156 |
| 5495 | CACCCCAU G CACCUCCC | 1360 | CCCACCTC GGCTAGCTACAACGA ATCCCCTG | 6157 |
| 5498 | CCGAUCGA G CUCCCCGA | 1361 | TCCGCCAC GGCTAGCTACAACGA TGCATCCC | 6158 |
| 5502 | UCCACCUC G CCCACCAC | 1362 | CTCCTCCC CCCTAGCTACAACGA CACCTCCA | 6159 |
| 5507 | CUCCCCGA G CAGUUCAA | 1363 | TTGAACTC CCCTAGCTACAACGA TCCGCCAC | 6160 |
| 5510 | GCCCACGA G UUCAACGA | 1364 | TGCTTCAA GGCTAGCTACAACGA TGCTCCCC | 6161 |
| 5516 | CAGUUCAA G CAGAAGGC | 1365 | GCCTTCTG GGCTAGCTACAACGA TTGAACTG | 6162 |
| 5523 | AGCAGAAG G CGCUCGGA | 1366 | TCCGAGCG GGCTAGCTACAACGA CTTCTGCT | 6163 |
| 5525 | CAGAAGGC G CUCGGAUU | 1367 | AATCCGAG GGCTAGCTACAACGA GCCTTCTG | 6164 |
| 5531 | GCGCUCGG A UUGCUGCA | 1368 | TGCAGCAA GGCTAGCTACAACGA CCGAGCGC | 6165 |
| 5534 | CUCCGAUU G CUGCAAAC | 1369 | GTTTGCAG GGCTAGCTACAACGA AATCCGAG | 6166 |
| 5537 | GGAUUGCU G CAAACAGC | 1370 | GCTGTTTG GGCTAGCTACAACGA AGCAATCC | 6167 |
| 5541 | UGCUGCAA A CAGCCACC | 1371 | GGTGGCTG GGCTAGCTACAACGA TTGCAGCA | 6168 |
| 5544 | UGCAAACA G CCACCAAC | 1372 | GTTGGTGG GGCTAGCTACAACGA TGTTTGCA | 6169 |
| 5547 | AAACAGCC A CCAACCAA | 1373 | TTGGTTGG GGCTAGCTACAACGA GGCTGTTT | 6170 |
| 5551 | AGCCACGA A CCAAGCGG | 1374 | CCGCTTGG GGCTAGCTACAACGA TGGTGGCT | 6171 |
| 5556 | CCAACCAA G CGGAGGCU | 1375 | AGCCTCCG GGCTAGCTACAACGA TTGGTTGG | 6172 |
| 5562 | AAGCGGAG G CUGCUGCU | 1376 | AGCAGCAG GGCTAGCTACAACGA CTCCGCTT | 6173 |
| 5565 | CGGAGGCU G CUGCUCCC | 1377 | GGGAGCAG GGCTAGCTACAACGA AGCCTCCG | 6174 |
| 5568 | AGGCUGCU G CUCCCGUG | 1378 | CACGGGAG GGCTAGCTACAACGA AGCAGCCT | 6175 |
| 5574 | CUGCUCCC G UGGUGGAA | 1379 | TTCCACGA GGCTAGCTACAACGA GGGAGCAG | 6176 |
| 5577 | CUCCCGUG G UGGAAUCC | 1380 | GGATTCGA GGCTAGCTACAACGA CACGGGAG | 6177 |
| 5582 | GUGGUGGA A UCCAAGUG | 1381 | CACTTGGA GGCTAGCTACAACGA TCCACCAC | 6178 |
| 5588 | GAAUCCAA G UGGCGAGC | 1382 | GCTCGCGA GGCTAGCTACAACGA TTGGATTC | 6179 |
| 5591 | UCCAAGUG G CGAGCCCU | 1383 | AGGGCTCG GGCTAGCTACAACGA CACTTGGA | 6180 |
| 5595 | AGUGGCGA G CCCUUGAG | 1384 | CTCAAGGG GGCTA0CTACAACGA TCGCCACT | 6181 |
| 5604 | CCCUUGAG G CUUUCUGG | 1385 | CCAGAAAG GGCTAGCTACAACGA CTCAAGGG | 6182 |
| 5613 | CUUUCUGG G CGAAGCAC | 1386 | GTGCTTCG GGCTAGCTACAACGA CCAGAAAG | 6183 |
| 5618 | UGGGCGAA G CACAUGUG | 1387 | CACATGTG GGCTAGCTACAACGA TTCGCCCA | 6184 |
| 5620 | GGCGAAGC A CAUGUGGA | 1388 | TCCACATG GGCTAGCTACAACGA GCTTCGCC | 6185 |
| 5622 | CGAAGCAC A UGUUGAAU | 1389 | ATTCCACA GGCTAGCTACAACGA GTGCTTCG | 6186 |
| 5624 | AAGCACAU G UGGAAUUU | 1390 | AAATTCGA GGCTAGCTACAACGA ATGTGCTT | 6187 |
| 5629 | CAUGUGGA A UUUCAUCA | 1391 | TGATGAAA GGCTAGCTACAACGA TCCACATG | 6188 |
| 5634 | GGAAUUUC A UCAGCGGG | 1392 | CCCGCTGA GGCTAGCTACAACGA GAAATTCC | 6189 |
| 5638 | UUUCAUCA G CGGGAUAC | 1393 | GTATCCCG GGCTAGCTACAACGA TGATGAAA | 6190 |
| 5643 | UCAGCGGG A UACAGUAC | 1394 | GTACTGTA GGCTAGCTACAACGA CCCGCTGA | 6191 |
| 5645 | AGCGGGAU A CAGUACCU | 1395 | AGGTACTG GGCTAGCTACAACGA ATCCCGCT | 6192 |
| 5648 | GGGAUACA G UACCUAGC | 1396 | GCTAGGTA GGCTAGCTACAACGA TGTATCCC | 6193 |
| 5650 | GAUACAGU A CCUAGCAG | 1397 | CTGCTAGG GGCTAGCTACAACGA ACTGTATC | 6194 |
| 5655 | AGUACCUA G CAGGCUUG | 1398 | CAAGCCTG GGCTAGCTACAACGA TAGGTACT | 6195 |
| 5659 | CCUAGCAG G CUUGUCCA | 1399 | TGGACAAG GGCTAGCTACAACGA CTGCTAGG | 6196 |
| 5663 | GCAGGCUU G UCCACUCU | 1400 | AGAGTGGA GGCTAGCTACAACGA AAGCCTGC | 6197 |
| 5667 | GCUUGUCC A CUCUGCCU | 1401 | AGGCAGAG GGCTAGCTACAACGA GGACAAGC | 6198 |
| 5672 | UCCACUCU G CCUGGGAA | 1402 | TTCCCAGG GGCTAGCTACAACGA AGAGTGGA | 6199 |
| 5680 | GCCUGGGA A CCCCGCGA | 1403 | TCGCGGGG GGCTAGCTACAACGA TCCCAGGC | 6200 |
| 5685 | GGAACCCC G CGAUAGCA | 1404 | TGCTATCG GGCTAGCTACAACGA GGGGTTCC | 6201 |
| 5688 | ACCCCGCG A UAGCAUCA | 1405 | TGATGCTA GGCTAGCTACAACGA CGCGGGGT | 6202 |
| 5691 | CCGCGAUA G CAUCAUUG | 1406 | CAATGATG GGCTAGCTACAACGA TATCGCGG | 6203 |
| 5693 | GCGAUAGC A UCAUUGAU | 1407 | ATCAATGA GGCTAGCTACAACGA GCTATCGC | 6204 |
| 5696 | AUAGCAUC A UUGAUGGC | 1408 | GCCATCAA GGCTAGCTACAACGA GATGCTAT | 6205 |
| 5700 | CAUCAUUG A UGGCAUUC | 1409 | GAATGCGA GGCTAGCTACAACGA CAATGATG | 6206 |
| 5703 | CAUUGAUG G CAUUCACA | 1410 | TGTGAATG GGCTAGCTACAACGA CATCAATG | 6207 |
| 5705 | UUGAUGGC A UUCACAGC | 1411 | GCTGTGAA GGCTAGCTACAACGA GCCATCAA | 6208 |
| 5709 | UGGCAUUC A CAGCCUCC | 1412 | GGAGGCTG GGCTAGCTACAACGA GAATGCCA | 6209 |
| 5712 | CAUUCACA G CCUCCAUC | 1413 | GATGGAGG GGCTAGCTACAACGA TGTGAATG | 6210 |
| 5718 | CAGCCUCC A UCACCAGC | 1414 | GCTGGTGA GGCTAGCTACAACGA GGAGGCTG | 6211 |
| 5721 | CCUCCAUC A CCAGCCCG | 1415 | CGGGCTGG GGCTAGCTACAACGA GATGGAGG | 6212 |
| 5725 | CAUCACGA G CCCGCUCA | 1416 | TGAGCGGG GGCTAGCTACAACGA TGGTGATG | 6213 |
| 5729 | ACCAGCCC G CUCACCAC | 1417 | GTGGTGAG GGCTAGCTACAACGA GGGCTGGT | 6214 |
| 5733 | GCCCGCUC A CCACCCAA | 1418 | TTGGGTGG GGCTAGCTACAACGA GAGCGGGC | 6215 |
| 5736 | CGCUCACC A CCCAAAGC | 1419 | GCTTTGGG GGCTAGCTACAACGA GGTGAGCG | 6216 |
| 5743 | CACCCAAA G CACCCUCC | 1420 | GGAGGGTG GGCTAGCTACAACGA TTTGGGTG | 6217 |
| 5745 | CCCAAAGC A CCCUCCUG | 1421 | CAGGAGGG GGCTAGCTACAACGA GCTTTGGG | 6218 |
| 5753 | ACCCUCCU G UUCAACAU | 1422 | ATGTTGAA GGCTAGCTACAACGA AGGAGGGT | 6219 |
| 5758 | CCUGUUCA A CAUCUUGG | 1423 | CCAAGATG GGCTAGCTACAACGA TGAACAGG | 6220 |
| 5760 | UGUUCAAC A UCUUGGGA | 1424 | TCCCAAGA GGCTAGCTACAACGA GTTGAACA | 6221 |
| 5771 | UUGGGAGG G UGGGUGGC | 1425 | GCCACCGA GGCTAGCTACAACGA CCTCCCAA | 6222 |
| 5775 | GACGGUGG G UGGCCGCC | 1426 | GCCGGCGA GGCTAGCTACAACGA CCACCCTC | 6223 |
| 5778 | GGUGGGUG G CCGCCCAA | 1427 | TTGGGCGG GGCTAGCTACAACGA CACCCACC | 6224 |
| 5781 | GGGUGGCC G CCCAACUC | 1428 | GAGTTGGG GGCTAGCTACAACGA GGCCACCC | 6225 |
| 5786 | GCCGCCCA A CUCGCUCC | 1429 | GGAGCGAG GGCTAGCTACAACGA TGGGCGGC | 6226 |
| 5790 | CCCAACUC G CUCCCCCC | 1430 | GGGGGGAG GGCTAGCTACAACGA GAGTTGGG | 6227 |
| 5802 | CCCCCAGA G CCGUUUCG | 1431 | CGAAACGG GGCTAGCTACAACGA TCTGGGGG | 6228 |
| 5805 | CCAGAGCC G UUUCGGCC | 1432 | GGCCGAAA GGCTAGCTACAACGA GGCTCTGG | 6229 |
| 5811 | CCGUUUCC G CCUUCGUG | 1433 | CACGAAGG GGCTAGCTACAACGA CGAAACGG | 6230 |
| 5817 | CGGCCUUC G UGGGCGCC | 1434 | GGCGCCGA GGCTAGCTACAACGA GAAGGCCG | 6231 |
| 5821 | CUUCGUGG G CGCCGGCA | 1435 | TGCCGGCG GGCTAGCTACAACGA CCACGAAG | 6232 |
| 5823 | UCGUGGGC G CCGGCAUC | 1436 | GATGCCGG GGCTAGCTACAACGA GCCCACGA | 6233 |
| 5827 | CGCCGCCG G CAUCGCUG | 1437 | CACCGATG GGCTAGCTACAACGA CGGCCCCC | 6234 |
| 5829 | CCGCCGGC A UCCCUGGC | 1438 | GCCAGCGA GGCTAGCTACAACGA GCCGGCGC | 6235 |
| 5832 | CCCCCAUC G CUGGCGCG | 1439 | CGCGCCAG GGCTAGCTACAACGA GATGCCGG | 6236 |
| 5836 | CAUCGCUG G CGCGCCUG | 1440 | CAGCCGCG GGCTAGCTACAACGA CAGCGATC | 6237 |
| 5838 | UCCCUGGC G CGCCUGUU | 1441 | AACACCCG GGCTAGCTACAACGA GCCAGCGA | 6238 |
| 5841 | CUGGCGCG G CUGUUCGC | 1442 | CCCAACAG GGCTAGCTACAACGA CGCGCCAG | 6239 |
| 5844 | CCGCGGCU G UUGGCAGC | 1443 | CCTCCCAA GGCTAGCTACAACGA AGCCGCGC | 6240 |
| 5848 | GGCUCUUG G CAGCAUAC | 1444 | CTATGCTC GGCTAGCTACAACGA CAACAGCC | 6241 |
| 5851 | UCUUGCGA G CAUAGGCC | 1445 | GGCCTATG GGCTAGCTACAACGA TCCCAACA | 6242 |
| 5853 | UUGGCACC A UAGCCCUU | 1446 | AAGGCCTA CCCTAGCTACAACGA CCTCCCAA | 6243 |
| 5857 | CAGCAUAC G CCUUGGGA | 1447 | TCCCAAGC CCCTAGCTACAACGA CTATCCTC | 6244 |
| 5868 | UUGCCAAG G UGCUUGUA | 1448 | TACAAGCA GGCTAGCTACAACGA CTTCCCAA | 6245 |
| 5870 | GGGAAGGU G CUUGUACA | 1449 | TCTACAAG GGCTAGCTACAACGA ACCTTCCC | 6246 |
| 5874 | ACGUCCUU G UACACAUU | 1450 | AATGTCTA GGCTAGCTACAACGA AACCACCT | 6247 |
| 5878 | CCUUGUAG A CAUUCUGG | 1451 | CCAGAATG GGCTAGCTACAACGA CTACAAGC | 6248 |
| 5880 | UUGUAGAC A UUCUGGCG | 1452 | CGCCAGAA GGCTAGCTACAACGA GTCTACAA | 6249 |
| 5886 | ACAUUCUG G CGGGCUAU | 1453 | ATAGCCCG GGCTAGCTACAACGA CAGAATGT | 6250 |
| 5890 | UCUGGCGG G CUAUGCAG | 1454 | CTCCATAC GGCTAGCTACAACGA CCGCCAGA | 6251 |
| 5893 | GGCGGGCU A UGGACCAG | 1455 | CTGCTCGA GGCTAGCTACAACGA AGCCCGCC | 6252 |
| 5898 | CCUAUCGA G CACGAGUG | 1456 | CACTCCTG GGCTAGCTACAACGA TCCATAGC | 6253 |
| 5904 | GAGCACGA G UGGCGGCU | 1457 | ACCCGCGA GGCTAGCTACAACGA TCCTGCTC | 6254 |
| 5907 | CAGGAGUG G CGGGUGCU | 1458 | AGCACCCG GGCTAGCTACAACGA CACTCCTG | 6255 |
| 5911 | AGUGCCGG G UGCUCUCG | 1459 | CCAGAGCA GGCTAGCTACAACGA CCGCCACT | 6256 |
| 5913 | UGGCGGGU G CUCUCGUG | 1460 | CACGAGAG GGCTAGCTACAACGA ACCCGCCA | 6257 |
| 5919 | CUGCUCUC G UGCCCUUC | 1461 | GAACGCGA GGCTAGCTACAACGA GAGAGCAC | 6258 |
| 5922 | CUCUCCUG G CCUUCAAC | 1462 | CTTGAAGC GGCTAGCTACAACGA CACCACAG | 6259 |
| 5931 | CCUUCAAG G UCAUCACC | 1463 | CCTCATCA GGCTAGCTACAACGA CTTCAAGC | 6260 |
| 5934 | UCAAGCUC A UCAGCGGG | 1464 | CCCCCTCA GGCTAGCTACAACGA GACCTTCA | 6261 |
| 5938 | CCUCAUCA G CCCGCACA | 1465 | TCTCCCCC GGCTAGCTACAACGA TCATGACC | 6262 |
| 5946 | CCCCCCAC A UCCCUUCU | 1466 | ACAACCGA GGCTAGCTACAACGA CTCCCCCC | 6263 |
| 5948 | CCGCACAU G CCUUCUAC | 1467 | GTACAAGC GGCTAGCTACAACGA ATCTCCCC | 6264 |
| 5955 | UCCCUUCU A CCGAGGAC | 1468 | CTCCTCCC GGCTAGCTACAACGA ACAACGCA | 6265 |
| 5962 | UACCGACG A CCUGGUCA | 1469 | TGACCACC GGCTAGCTACAACGA CCTCGGTA | 6266 |
| 5967 | AGGACCUG G UCAACUUA | 1470 | TAACTTGA GGCTAGCTACAACGA CAGGTCCT | 6267 |
| 5971 | CCUCCUCA A CUUACUCC | 1471 | GCACTAAC GGCTAGCTACAACGA TGACCAGC | 6268 |
| 5975 | GUCAACUU A CUCCCUGC | 1472 | GCACGCAC GGCTAGCTACAACGA AACTTCAC | 6269 |
| 5982 | UACUCCCU G CCAUCCUC | 1473 | CAGCATCC GGCTAGCTACAACGA ACCCAGTA | 6270 |
| 5985 | UCCCUGCC A UCCUCUCU | 1474 | ACACAGGA GGCTAGCTACAACGA GGCACCCA | 6271 |
| 5998 | CUCUCCUC G CCCCCUGG | 1475 | CCACCCCC GGCTAGCTACAACGA CACCACAC | 6272 |
| 6000 | CUCCUGGC G CCCUGGUC | 1476 | CACCACGC GGCTAGCTACAACGA CCCACGAG | 6273 |
| 6006 | GCGCCCUG G UCGUCGGG | 1477 | CCCGACGA GGCTAGCTACAACGA CAGGCCCC | 6274 |
| 6009 | CCCUGGUC G UCGGGGUG | 1478 | CACCCCGA GGCTAGCTACAACGA CACCAGGC | 6275 |
| 6015 | UCGUCGGG G UGGUGUGC | 1479 | GCACACGA GGCTAGCTACAACGA CCCGACGA | 6276 |
| 6018 | UCGGGGUG G UGUGCGCA | 1480 | TGCGCACA GGCTAGCTACAACGA CACCCCGA | 6277 |
| 6020 | GGGGUGGU G UGCGCAGC | 1481 | GCTGCGCA GGCTAGCTACAACGA ACCACCCC | 6278 |
| 6022 | GGUGGUGU G CGCAGCGA | 1482 | TCGCTGCG GGCTAGCTACAACGA ACACCACC | 6279 |
| 6024 | UGGUGUGC G CAGCGAUA | 1483 | TATCGCTG GGCTAGCTACAACGA GCACACCA | 6280 |
| 6027 | UGUGCGCA G CGAUACUG | 1484 | CAGTATCG GGCTAGCTACAACGA TGCGCACA | 6281 |
| 6030 | GCGCAGCG A UACUGCGU | 1485 | ACGCAGTA GGCTAGCTACAACGA CGCTGCGC | 6282 |
| 6032 | GCAGCGAU A CUGCGUCG | 1486 | CGACGCAG GGCTAGCTACAACGA ATCGCTGC | 6283 |
| 6035 | GCGAUACU G CGUCGGCA | 1487 | TGCCGACG GGCTAGCTACAACGA AGTATCGC | 6284 |
| 6037 | GAUACUGC G UCGGCAUG | 1488 | CATGCCGA GGCTAGCTACAACGA GCAGTATC | 6285 |
| 6041 | CUGCGUCG G CAUGUGGG | 1489 | CCCACATG GGCTAGCTACAACGA CCACCCAC | 6286 |
| 6043 | GCCUCGGC A UGUGGGCC | 1490 | GGCCCACA GGCTAGCTACAACGA GCCGACGC | 6287 |
| 6045 | CUCCCCAU G UGGGCCCA | 1491 | TGGGCCGA GGCTAGCTACAACGA ATGCCGAC | 6288 |
| 6049 | GCAUGUGG G CCCAGGAG | 1492 | CTCCTGGG GGCTAGCTACAACGA CCACATGC | 6289 |
| 6061 | AGCAGAGG G CGCUGUGC | 1493 | GCACAGCG GGCTAGCTACAACGA CCTCTCCT | 6290 |
| 6063 | GACACCCC G CUGUCCAG | 1494 | CTGCACAG GGCTAGCTACAACGA GCCCTCTC | 6291 |
| 6066 | AGGGCGCU G UGCAGUGG | 1495 | CCACTGCA GGCTAGCTACAACGA AGCGCCCT | 6292 |
| 6068 | CGCGCUGU G CAGUGGAU | 1496 | ATCCACTG GGCTAGCTACAACGA ACAGCGCC | 6293 |
| 6071 | GCUCUCGA G UGGAUGAA | 1497 | TTCATCGA GGCTAGCTACAACGA TCCACACC | 6294 |
| 6075 | UCCACUGG A UCAAUCGC | 1498 | CCCATTCA GGCTAGCTACAACGA CCACTGCA | 6295 |
| 6079 | GUGGAUCA A UCGCCUCA | 1499 | TCAGCCGA GGCTAGCTACAACGA TCATCCAC | 6296 |
| 6083 | AUGAAUCG G CUGAUAGC | 1500 | GCTATCAG GGCTAGCTACAACGA CGATTCAT | 6297 |
| 6087 | AUCGGCUG A UAGCGUUC | 1501 | CAACGCTA GGCTAGCTACAACGA CACCCCAT | 6298 |
| 6090 | CCCUGAUA G CGUUCGCU | 1502 | AGCGAACG GGCTAGCTACAACGA TATCAGCC | 6299 |
| 6092 | CUCAUAGC G UUCGCUUC | 1503 | GAAGCGAA GGCTAGCTACAACGA GCTATCAG | 6300 |
| 6096 | UAGCGUUC G CUUCGCGG | 1504 | CCGCGAAG GGCTAGCTACAACGA GAACGCTA | 6301 |
| 6101 | UUCGCUUC G CGGGCCAA | 1505 | TTGCCCCG GGCTAGCTACAACGA GAAGCGAA | 6302 |
| 6106 | UUCGCGGG G CAACCAUG | 1506 | CATGGTTG GGCTAGCTACAACGA CCCGCGAA | 6303 |
| 6109 | GCCCGGCA A CCAUGUCU | 1507 | AGACATGG GGCTAGCTACAACGA TGCCCCGC | 6304 |
| 6112 | GGGCAACC A UGUCUCCC | 1508 | GGGAGACA GGCTAGCTACAACGA GGTTGCCC | 6305 |
| 6114 | CCAACCAU G UCUCCCCC | 1509 | GGGGGACA GGCTAGCTACAACGA ATGGTTGC | 6306 |
| 6123 | UCUCCCCC A CGCACUAU | 1510 | ATAGTGCG GGCTAGCTACAACGA G3GGGAGA | 6307 |
| 6125 | UCCCCCAC G CACUAUGU | 1511 | ACATAGTC GGCTAGCTACAACGA CTGGGGGA | 6308 |
| 6127 | CCCCACCC A CUAUCUGC | 1512 | CCACATAG GGCTAGCTACAACGA GCCTGGGG | 6309 |
| 6130 | CACGCACU A UGUCCCUG | 1513 | CAGGCACA GGCTAGCTACAACGA AGTGCGTG | 6310 |
| 6132 | CCCACUAU G UGCCUCAG | 1514 | CTCACCGA GGCTAGCTACAACGA ATAGTCCC | 6311 |
| 6134 | CACUAUCU G CCUGAGAG | 1515 | CTCTCAGC GGCTAGCTACAACGA ACATAGTG | 6312 |
| 6142 | GCCUGACA G CGACCCAC | 1516 | CTGCGTCG GGCTAGCTACAACGA TCTCACCC | 6313 |
| 6145 | UCACAGCG A CGCAGCGC | 1517 | CCGCTCCC GGCTAGCTACAACGA CGCTCTCA | 6314 |
| 6147 | AGAGCGAC G CAGCGGCG | 1518 | CGCCGCTG GGCTAGCTACAACGA GTCGCTCT | 6315 |
| 6150 | GCCACCGA G CGCCGCCC | 1519 | GCGCGCCG GGCTAGCTACAACGA TGCGTCCC | 6316 |
| 6153 | ACGCAGCG G CCCGCGUC | 1520 | CACCCCCG GGCTAGCTACAACGA CCCTCCGT | 6317 |
| 6155 | CCACCCGC G CGCCUCAC | 1521 | CTCACCCC GGCTAGCTACAACGA GCCCCTCC | 6318 |
| 6157 | ACCGGCCC G CGUCACAC | 1522 | GTGTCACG GGCTAGCTACAACGA GCCCCGCT | 6319 |
| 6159 | CCCCGCCC G UCACACAA | 1523 | TTCTCTCA GGCTAGCTACAACGA GCGCGCCG | 6320 |
| 6162 | CGCCCGUC A CACAAAUC | 1524 | CATTTGTG GGCTAGCTACAACGA GACGCGCG | 6321 |
| 6164 | CCCCUCAC A CAAAUCCU | 1525 | ACCATTTG GGCTAGCTACAACGA GTCACCCG | 6322 |
| 6168 | UCACACAA A UCCUCUCC | 1526 | CCAGAGGA GGCTAGCTACAACGA TTGTGTGA | 6323 |
| 6178 | CCUCUCGA G CCUCACGA | 1527 | TCCTGAGG GGCTAGCTACAACGA TCCACAGC | 6324 |
| 6283 | CCACCCUC A CCAUCACU | 1528 | AGTCATGC GGCTAGCTACAACGA GACCCTGG | 6325 |
| 6186 | CCCUCACC A UCACUCAG | 1529 | CTCACTGA GGCTAGCTACAACGA CCTCACCC | 6326 |
| 6189 | UCACCAUC A CUCACCUG | 1530 | CAGCTGAC GGCTAGCTACAACGA GATGGTGA | 6327 |
| 6194 | AUCACUCA G CUCCUGAG | 1531 | CTCAGCAG GGCTAGCTACAACGA TGACTCAT | 6328 |
| 6197 | ACUCAGCU G CUGAGGAG | 1532 | CTCCTCAG GGCTAGCTACAACGA ACCTCAGT | 6329 |
| 6206 | CUGAGGAG G CUCCAUCA | 1533 | TCATGCAC GGCTAGCTACAACGA CTCCTCAG | 6330 |
| 6211 | GAGGCUCC A UCACUGGA | 1534 | TCCACTCA GGCTAGCTACAACGA CGACCCTC | 6331 |
| 6215 | CUCCAUCA G UGGAUCAA | 1535 | TTGATCGA GGCTAGCTACAACGA TCATCGAC | 6332 |
| 6219 | AUCAGUGG A UCAAUGAG | 1536 | CTCATTGA GGCTAGCTACAACGA CCACTGAT | 6333 |
| 6223 | GUGGAUCA A UGAGGACU | 1537 | AGTCCTCA GGCTAGCTACAACGA TGATCCAC | 6334 |
| 6229 | CAAUGAGG A CUGCUCGA | 1538 | TGGAGCAG GGCTAGCTACAACGA CCTCATTG | 6335 |
| 6232 | UGAGGACU G CUCCACGC | 1539 | GCGTGGAG GGCTAGCTACAACGA AGTCCTCA | 6336 |
| 6237 | ACUGCUCC A CGCCAUGU | 1540 | ACATGGCG GGCTAGCTACAACGA GGAGCAGT | 6337 |
| 6239 | UGCUCCAC G CCAUGUUC | 1541 | GAACATGG GGCTAGCTACAACGA GTGGAGCA | 6338 |
| 6242 | UCCACGCC A UGUUCCCG | 1542 | CCGGAACA GGCTAGCTACAACGA GCCGTGGA | 6339 |
| 6244 | CACGCCAU G UUCCGGCU | 1543 | AGCCGGAA GGCTAGCTACAACGA ATGGCGTC | 6340 |
| 6250 | AUGUUCCG G CUCGUGGC | 1544 | GCCACGAG GGCTAGCTACAACGA CGGAACAT | 6341 |
| 6254 | UCCGGCUC G UGGCUAAG | 1545 | CTTAGCGA GGCTAGCTACAACGA GAGCCGGA | 6342 |
| 6257 | GGCUCGUG G CUAAGGGA | 1546 | TCCCTTAG GGCTAGCTACAACGA CACGAGCC | 6343 |
| 6265 | GCUAAGGG A UGUUUGGG | 1547 | CCCAAACA GGCTAGCTACAACGA CCCTTAGC | 6344 |
| 6267 | UAAGGGAU G UUUGGGAC | 1548 | GTCCCAAA GGCTAGCTACAACGA ATCCCTTA | 6345 |
| 6274 | UGUUUGGG A CUGGAUAU | 1549 | ATATCCAG GGCTAGCTACAACGA CCCAAACA | 6346 |
| 6279 | GGGACUGG A UAUGCACG | 1550 | CGTGCATA GGCTAGCTACAACGA CCAGTCCC | 6347 |
| 6281 | GACUGGAU A UGCACGGU | 1551 | ACCGTGCA GGCTAGCTACAACGA ATCCAGTC | 6348 |
| 6283 | CUGGAUAU G CACGGUGU | 1552 | ACACCGTG GGCTAGCTACAACGA ATATCCAG | 6349 |
| 6285 | GGAUAUGC A CGCUGUUG | 1553 | CAACACCG GGCTAGCTACAACGA GCATATCC | 6350 |
| 6288 | UAUGCACG G UGUUGACU | 1554 | AGTCAACA GGCTAGCTACAACGA CGTGCATA | 6351 |
| 6290 | UGCACGGU G UUGACUGA | 1555 | TCAGTCAA GGCTAGCTACAACGA ACCGTGCA | 6352 |
| 6294 | CGGUGUUG A CUGACUUC | 1556 | GAAGTCAG GGCTAGCTACAACGA CAACACCG | 6353 |
| 6298 | GUUGACUG A CUUCAAGA | 1557 | TCTTGAAG GGCTAGCTACAACGA CAGTCAAC | 6354 |
| 6306 | ACUUCAAG A CCUGGCUU | 1558 | AAGCCAGG GGCTAGCTACAACGA CTTGAAGT | 6355 |
| 6311 | AAGACCUG G CUUCAGUC | 1559 | CACTGAAG GGCTAGCTACAACGA CAGGTCTT | 6356 |
| 6317 | UGGCUUCA G UCCAAGCU | 1560 | AGCTTGGA GGCTAGCTACAACGA TGAAGCCA | 6357 |
| 6323 | CAGUCCAA G CUCCUGCC | 1561 | CGCAGGAG GGCTAGCTACAACGA TTGGACTG | 6358 |
| 6329 | AAGCUCCU G CCGCGGUU | 1562 | AACCGCGG GGCTAGCTACAACGA AGGAGCTT | 6359 |
| 6332 | CUCCUGCC G CGGUUGCC | 1563 | CGCAACCG GGCTAGCTACAACGA GGCAGGAG | 6360 |
| 6335 | CUGCCCCC G UUGCCGGG | 1564 | CCCGGCAA GGCTAGCTACAACGA CGCGGCAG | 6361 |
| 6338 | CCGCGGUU G CCGGGAGU | 1565 | ACTCCCGG GGCTAGCTACAACGA AACCGCGG | 6362 |
| 6345 | UGCCGGGA G UCCCUUUC | 1566 | GAAAGGGA GGCTAGCTACAACGA TCCCCCCA | 6363 |
| 6359 | UUCUUCUC A UGCCAACG | 1567 | CGTTGGCA GGCTAGCTACAACGA GAGAAGAA | 6364 |
| 6361 | CUUCUCAU G CCAACGUG | 1568 | CACGTTGG GGCTAGCTACAACGA ATGAGAAG | 6365 |
| 6365 | UCAUGCCA A CGUGGGUA | 1569 | TACCCACG GGCTAGCTACAACGA TGGCATGA | 6366 |
| 6367 | AUGCCAAC G UGGGUACA | 1570 | TGTACCGA GGCTAGCTACAACGA GTTGGCAT | 6367 |
| 6371 | CAACGUGG G UACAGGGG | 1571 | CCCCTGTA GGCTAGCTACAACGA CCACGTTG | 6368 |
| 6373 | ACCUGGGU A CAGGGGGG | 1572 | CCCCCCTG GGCTAGCTACAACGA ACCCACGT | 6369 |
| 6381 | ACAGGGGG G UCUGGCGG | 1573 | CCGCCACA GGCTAGCTACAACGA CCCCCTGT | 6370 |
| 6386 | GGGCUCUC G CGGGGACA | 1574 | TCTCCCCG GGCTAGCTACAACGA CAGACCCC | 6371 |
| 6394 | GCGGGGAC A CGCUAUCA | 1575 | TGATACCG GGCTAGCTACAACGA CTCCCCGC | 6372 |
| 6397 | GCGAGACC G UAUCAUCC | 1576 | CCATCATA GGCTAGCTACAACGA CGTCTCCC | 6373 |
| 6399 | CAGACCCU A UCAUGCAA | 1577 | TTCCATCA GGCTAGCTACAACGA ACCGTCTC | 6374 |
| 6402 | ACGGUAUC A UGCAAACC | 1578 | CGTTTCGA GGCTAGCTACAACGA GATACCGT | 6375 |
| 6404 | GCUAUCAU G CAAACCAC | 1579 | GTGGTTTG GGCTAGCTACAACGA ATGATACC | 6376 |
| 6408 | UCAUCCAA A CCACCUCC | 1580 | GCACGTGG GGCTAGCTACAACGA TTGCATGA | 6377 |
| 6411 | UCCAAACC A CCUGCCGA | 1581 | TGGCCACG GGCTAGCTACAACGA CGTTTGCA | 6378 |
| 6415 | AACCACCU G CCCAUGCG | 1582 | CGCATCGC GGCTAGCTACAACGA ACCTGGTT | 6379 |
| 6419 | ACCUGCCC A UGCCGAGC | 1583 | CCTCCCGA GGCTAGCTACAACGA GGCCAGCT | 6380 |
| 6421 | CUCCCCAU G CGGACCCC | 1584 | GCGCTCCG GGCTAGCTACAACGA ATGGCCAC | 6381 |
| 6426 | CAUGCGGA G CGCAGAUC | 1585 | GATCTGCG GGCTAGCTACAACGA TCCGCATC | 6382 |
| 6428 | UCCCCAGC G CACAUCAC | 1586 | GTCATCTC GGCTAGCTACAACGA GCTCCGCA | 6383 |
| 6432 | GAGCGCAG A UCACUGGA | 1587 | TCCAGTCA GGCTAGCTACAACGA CTGCGCTC | 6384 |
| 6435 | CCCACAUC A CUGGACAU | 1588 | ATGTCCAC GGCTAGCTACAACGA CATCTGCC | 6385 |
| 6440 | AUCACUGG A CAUGUCAA | 1589 | TTGACATC GGCTAGCTACAACGA CCACTGAT | 6386 |
| 6442 | CACUGGAC A UGUCAAGA | 1590 | TCTTGACA GGCTAGCTACAACGA GTCCAGTC | 6387 |
| 6444 | CUGGACAU G UCAAGAAC | 1591 | GTTCTTGA GGCTAGCTACAACGA ATGTCCAC | 6388 |
| 6451 | UGUCAAGA A CGGUUCCA | 1592 | TGGAACCG GGCTAGCTACAACGA TCTTGACA | 6389 |
| 6454 | CAAGAACG G UUCCAUGA | 1593 | TCATGGAA GGCTAGCTACAACGA CGTTCTTG | 6390 |
| 6459 | ACGGUUCC A UGAGGAUC | 1594 | GATCCTCA GGCTAGCTACAACGA GGAACCGT | 6391 |
| 6465 | CCAUGAGG A UCGUCGGG | 1595 | CCCGACGA GGCTAGCTACAACGA CCTCATGG | 6392 |
| 6468 | UGAGGAUC G UCGGGCCU | 1596 | AGGCCCGA GGCTAGCTACAACGA GATCCTCA | 6393 |
| 6473 | AUCGUCGG G CCUAAGAC | 1597 | GTCTTAGG GGCTAGCTACAACGA CCGACGAT | 6394 |
| 6480 | GGCCUAAG A CCUGUAGC | 1598 | GCTACAGG GGCTAGCTACAACGA CTTAGGCC | 6395 |
| 6484 | UAAGACCU G UAGCAACA | 1599 | TGTTGCTA GGCTAGCTACAACGA AGGTCTTA | 6396 |
| 6487 | GACCUGUA G CAACACGU | 1600 | ACGTGTTG GGCTAGCTACAACGA TACAGGTC | 6397 |
| 6490 | CUGUAGCA A CACGUGGC | 1601 | GCCACGTG GGCTAGCTACAACGA TGCTACAG | 6398 |
| 6492 | GUAGCAAC A CGUGGCAU | 1602 | ATGCCACG GGCTAGCTACAACGA GTTGCTAC | 6399 |
| 6494 | AGCAACAC G UGGCAUGG | 1603 | CCATGCGA GGCTAGCTACAACGA GTGTTGCT | 6400 |
| 6497 | AACACGUG G CAUCGAAC | 1604 | GTTCCATG GGCTAGCTACAACGA CACGTGTT | 6401 |
| 6499 | CACGUGGC A UGGAACAU | 1605 | ATGTTCGA GGCTAGCTACAACGA GCCACGTG | 6402 |
| 6504 | GGCAUGGA A CAUUCCCC | 1606 | GGGGAATG GGCTAGCTACAACGA TCCATGCC | 6403 |
| 6506 | CAUGGAAC A UUCCCCAU | 1607 | ATGGGGAA GGCTAGCTACAACGA GTTCCATG | 6404 |
| 6513 | CAUUCCCC A UCAACGCA | 1608 | TGCGTTGA GGCTAGCTACAACGA GGGGAATG | 6405 |
| 6517 | CCCCAUCA A CGCAUACA | 1609 | TGTATGCG GGCTAGCTACAACGA TGATGGGG | 6406 |
| 6519 | CCAUCAAC G CAUACACC | 1610 | GGTGTATG GGCTAGCTACAACGA GTTGATGG | 6407 |
| 6521 | AUCAACGC A UACACCAC | 1611 | GTGGTGTA GGCTAGCTACAACGA GCGTTGAT | 6408 |
| 6523 | CAACGCAU A CACCACGG | 1612 | CCGTGGTG GGCTAGCTACAACGA ATGCGTTG | 6409 |
| 6525 | ACGCAUAC A CCACGGGC | 1613 | GCCCGTGG GGCTAGCTACAACGA GTATGCGT | 6410 |
| 6528 | CAUACACC A CGGGCCCC | 1614 | GGGGCCCG GGCTAGCTACAACGA GGTGTATG | 6411 |
| 6532 | CACCACGG G CCCCUGCA | 1615 | TGCAGGGG GGCTAGCTACAACGA CCGTGGTG | 6412 |
| 6538 | GGGCCCCU G CACACCCU | 1616 | AGGGTGTG GGCTAGCTACAACGA AGGGGCCC | 6413 |
| 6540 | GCCCCUGC A CACCCUCC | 1617 | GGAGGGTG GGCTAGCTACAACGA GCAGGGGC | 6414 |
| 6542 | CCCUGCAC A CCCUCCCC | 1618 | GGGGAGGG GGCTAGCTACAACGA GTGCAGGG | 6415 |
| 6552 | CCUCCCCG G CGCCAAAC | 1619 | GTTTGGCG GGCTAGCTACAACGA CGGGGAGG | 6416 |
| 6554 | UCCCCGGC G CCAAACUA | 1620 | TAGTTTGG GGCTAGCTACAACGA GCCGGGGA | 6417 |
| 6559 | GGCGCCAA A CUAUUCUA | 1621 | TAGAATAG GGCTAGCTACAACGA TTGGCGCC | 6418 |
| 6562 | GCCAAACU A UUCUAGGG | 1622 | GGCTAGAA GGCTAGCTACAACGA AGTTTGGC | 6419 |
| 6570 | AUUCUAGG G CGCUAUGG | 1623 | CCATAGCG GGCTAGCTACAACGA CCTAGAAT | 6420 |
| 6572 | UCUAGGGC G CUAUGGCG | 1624 | CGCCATAG GGCTAGCTACAACGA GGGCTAGA | 6421 |
| 6575 | AGGGCGCU A UGGCGGGU | 1625 | ACCCGCGA GGCTAGCTACAACGA AGCGCCCT | 6422 |
| 6578 | GCGCUAUG G CGGGUGGC | 1626 | GCCACCCG GGCTAGCTACAACGA CATAGCGC | 6423 |
| 6582 | UAUGGCGG G UGGCCGCU | 1627 | AGCGGCGA GGCTAGCTACAACGA CCGCCATA | 6424 |
| 6585 | GGCGGCUG G CCGCUGAG | 1628 | CTCAGCGG GGCTAGCTACAACGA CACCCGCC | 6425 |
| 6588 | GGGUGGCC G CUGAGGAG | 1629 | CTCCTCAG GGCTAGCTACAACGA GGCCACCC | 6426 |
| 6596 | GCUCACGA G UACGUGGA | 1630 | TCCACGTA GGCTAGCTACAACGA TCCTCAGC | 6427 |
| 6598 | UGACGAGU A CGUCCAGG | 1631 | CCTCCACG GGCTAGCTACAACGA ACTCCTCA | 6428 |
| 6600 | AGGAGUAC G UGGAGCUU | 1632 | AACCTCGA GGCTAGCTACAACGA GTACTCCT | 6429 |
| 6606 | ACGUGGAG G UUACGCGG | 1633 | CCGCGTAA GGCTAGCTACAACGA CTCCACCT | 6430 |
| 6609 | UGCAGGUU A CGCGGGUG | 1634 | CACCCCCG GGCTAGCTACAACGA AACCTCCA | 6431 |
| 6611 | GACGUUAC G CCCGUGGC | 1635 | CCCACCCC GGCTAGCTACAACGA GTAACCTC | 6432 |
| 6615 | UUACCCGG G UGCGGGAU | 1636 | ATCCCCGA GGCTAGCTACAACGA CCGCGTAA | 6433 |
| 6622 | GCUCGGGC A UUUCCACU | 1637 | AGTGGAAA GGCTAGCTACAACGA CCCCCACC | 6434 |
| 6628 | GGAUUUCC A CUACCUGA | 1638 | TCACGTAG GGCTAGCTACAACGA CGAAATCC | 6435 |
| 6631 | UUUCCACU A CGUCACGG | 1639 | CCGTCACG GGCTAGCTACAACGA AGTGGAAA | 6436 |
| 6633 | UCCACUAC G UGACCCGC | 1640 | GCCCGTCA GGCTAGCTACAACGA GTACTGGA | 6437 |
| 6636 | ACUACGUG A CGGGCAUG | 1641 | CATCCCCG GGCTAGCTACAACGA CACGTAGT | 6438 |
| 6640 | CGUCACCC G CAUGACGA | 1642 | TGGTCATG GGCTAGCTACAACGA CCGTCACG | 6439 |
| 6642 | UGACGGGC A UGACCACU | 1643 | AGTGGTCA GGCTAGCTACAACGA GCCCGTCA | 6440 |
| 6645 | CCCGCAUC A CCACUCAC | 1644 | CTCACTCG GGCTAGCTACAACGA CATGCCCG | 6441 |
| 6648 | GCAUGACC A CUGACAAC | 1645 | GTTGTCAG GGCTAGCTACAACGA GGTCATCC | 6442 |
| 6652 | GACCACUG A CAACGUAA | 1646 | TTACGTTC GGCTAGCTACAACGA CAGTGGTC | 6443 |
| 6655 | CACUGACA A CGUAAAAU | 1647 | ATTTTACG GGCTAGCTACAACGA TGTCAGTG | 6444 |
| 6657 | CUGACAAC G UAAAAUGC | 1648 | GCATTTTA GGCTAGCTACAACGA GTTGTCAG | 6445 |
| 6662 | AACGUAAA A UGCCCGUG | 1649 | CACGCGCA GGCTAGCTACAACGA TTTACGTT | 6446 |
| 6664 | CGUAAAAU G CCCGUGCC | 1650 | GGCACGGG GGCTAGCTACAACGA ATTTTACG | 6447 |
| 6668 | AAAUGCCC G UGCCACGU | 1651 | ACCTGGCA GGCTAGCTACAACGA GGGCATTT | 6448 |
| 6670 | AUGCCCGU G CCAGGUUC | 1652 | GAACCTGG GGCTAGCTACAACGA ACGGGCAT | 6449 |
| 6675 | CGUGCCAG G UUCCGCCC | 1653 | GGGCGGAA GGCTAGCTACAACGA CTGGCACG | 6450 |
| 6680 | CAGGUUCC G CCCCCCGA | 1654 | TCGGGGGG GGCTAGCTACAACGA GGAACCTG | 6451 |
| 6689 | CCCCCCGA A UUCUUCAC | 1655 | GTGAAGAA GGCTAGCTACAACGA TCGGGGGG | 6452 |
| 6696 | AAUUCUUC A CGGAAGUG | 1656 | CACTTCCG GGCTAGCTACAACGA GAAGAATT | 6453 |
| 6702 | UCACGGAA G UGGAUGGG | 1657 | CCCATCGA GGCTAGCTACAACGA TTCCGTGA | 6454 |
| 6706 | GGAAGUGG A UGGGGUAC | 1658 | GTACCCGA GGCTAGCTACAACGA CCACTTCC | 6455 |
| 6711 | UGGAUGGG G UACGCCUG | 1659 | CAGGCGTA GGCTAGCTACAACGA CCCATCCA | 6456 |
| 6713 | GAUGGGGU A CGCCUGCA | 1660 | TGCAGGCG GGCTAGCTACAACGA ACCCCATC | 6457 |
| 6715 | UGGGGUAC G CCUGCACA | 1661 | TGTGCAGG GGCTAGCTACAACGA GTACCCCA | 6458 |
| 6719 | GUACGCCU G CACAGAAA | 1662 | TTTCTGTG GGCTAGCTACAACGA AGGCGTAC | 6459 |
| 6721 | ACGCCUGC A CAGAAACG | 1663 | CGTTTCTG GGCTAGCTACAACGA GCAGGCGT | 6460 |
| 6727 | GCACAGAA A CGCUCCGG | 1664 | CCGGAGCG GGCTAGCTACAACGA TTCTGTGC | 6461 |
| 6729 | ACAGAAAC G CUCCGGCG | 1665 | CGCCGGAG GGCTAGCTACAACGA GTTTCTGT | 6462 |
| 6735 | ACGCUCCG G CGUGUGGA | 1666 | TCCACACG GGCTAGCTACAACGA CGGAGCGT | 6463 |
| 6737 | GCUCCGGC G UGUGGACC | 1667 | GGTCCACA GGCTAGCTACAACGA GCCGGAGC | 6464 |
| 6739 | UCCGGCGU G UCGACCUC | 1668 | GAGGTCGA GGCTAGCTACAACGA ACGCCGGA | 6465 |
| 6743 | GCGUGUGG A CCUCUCCU | 1669 | AGGAGAGG GGCTAGCTACAACGA CCACACGC | 6466 |
| 6752 | CCUCUCCU A CGGGAGGA | 1670 | TCCTCCCG GGCTAGCTACAACGA AGGAGAGG | 6467 |
| 6762 | GGGAGGAG G UCACAUUC | 1671 | GAATGTGA GGCTAGCTACAACGA CTCCTCCC | 6468 |
| 6765 | AGGAGGUC A CAUUCCAG | 1672 | CTGGAATG GGCTAGCTACAACGA GACCTCCT | 6469 |
| 6767 | GAGGUCAC A UUCCAGGU | 1673 | ACCTGGAA GGCTAGCTACAACGA GTGACCTC | 6470 |
| 6774 | CAUUCCAG G UCGGGCUC | 1674 | GAGCCCGA GGCTAGCTACAACGA CTGGAATG | 6471 |
| 6779 | CAGGUCGG G CUCAACCA | 1675 | TGGTTGAG GGCTAGCTACAACGA CCGACCTG | 6472 |
| 6784 | CGGGCUCA A CCAAUACC | 1676 | GGTATTGG GGCTAGCTACAACGA TGAGCCCG | 6473 |
| 6788 | CUCAACCA A UACCUGGU | 1677 | ACCAGGTA GGCTAGCTACAACGA TGGTTGAG | 6474 |
| 6790 | CAACCAAU A CCUGGUUG | 1678 | CAACCAGG GGCTAGCTACAACGA ATTGGTTG | 6475 |
| 6795 | AAUACCUG G UUG3GUCA | 1679 | TGACCCAA GGCTAGCTACAACGA CAGGTATT | 6476 |
| 6800 | CUGGUUGG G UCACAGCU | 1680 | AGCTGTGA GGCTAGCTACAACGA CCAACCAG | 6477 |
| 6803 | GUUGGGUC A CAGCUCCC | 1681 | GGGAGCTG GGCTAGCTACAACGA GACCCAAC | 6478 |
| 6806 | GUGUCACA G CUCCCAUG | 1682 | CATGGGAG GGCTAGCTACAACGA TGTGACCC | 6479 |
| 6812 | CAGCUCCC A UGCGAGCC | 1683 | GGCTCGCA GGCTAGCTACAACGA GGGAGCTG | 6480 |
| 6814 | GCUCCCAU G CGAGCCCG | 1684 | CGGGCTCG GGCTAGCTACAACGA ATGGGAGC | 6481 |
| 6818 | CCAUGCGA G CCCGAACC | 1685 | GGTTCGGG GGCTAGCTACAACGA TCGCATGG | 6482 |
| 6824 | GAGCCCCA A CCGGAUGU | 1686 | ACATCCGG GGCTAGCTACAACGA TCGGGCTC | 6483 |
| 6829 | CGAACCGG A UGUAGCAG | 1687 | CTGCTACA GGCTAGCTACAACGA CCGGTTCG | 6484 |
| 6831 | AACCGGAU G UAGCAGUG | 1688 | CACTGCTA GGCTAGCTACAACGA ATCCGGTT | 6485 |
| 6834 | CGGAUGUA G CAGUGCUC | 1689 | GAGCACTG GGCTAGCTACAACGA TACATCCG | 6486 |
| 6837 | AUGUAGCA G UGCUCACG | 1690 | CGTGAGCA GGCTAGCTACAACGA TGCTACAT | 6487 |
| 6839 | GUAGCAGU G CUCACGUC | 1691 | GACGTGAG GGCTAGCTACAACGA ACTGCTAC | 6488 |
| 6843 | CAGUGCUC A CGUCCAUG | 1692 | CATGGACG GGCTAGCTACAACGA GAGCACTG | 6489 |
| 6845 | GUGCUCAC G UCCAUGCU | 1693 | AGCATGGA GGCTAGCTACAACGA GTGAGCAC | 6490 |
| 6849 | UCACGUCC A UGCUCACC | 1694 | GGTGAGCA GGCTAGCTACAACGA GGACGTGA | 6491 |
| 6851 | ACGUCCAU G CUCACCGA | 1695 | TCGGTGAG GGCTAGCTACAACGA ATGGACGT | 6492 |
| 6855 | CCAUGCUC A CCGACCCC | 1696 | GGGGTCGG GGCTAGCTACAACGA GAGCATGG | 6493 |
| 6859 | GCUCACCG A CCCCUCCC | 1697 | GGGAGGGG GGCTAGCTACAACGA CGGTGAGC | 6494 |
| 6868 | CCCCUCCC A CAUCACAG | 1698 | CTGTAATG GGCTAGCTACAACGA GGGAGGGG | 6495 |
| 6870 | CCUCCCAC A UUACAGGA | 1699 | TCCTGTAA GGCTAGCTACAACGA GTGGGAGG | 6496 |
| 6873 | CCCACAUU A CAGGAGAG | 1700 | CTCTCCTG GGCTAGCTACAACGA AATGTGGG | 6497 |
| 6882 | CAGGAGAG A CGGCUAAG | 1701 | CTTAGCCG GGCTAGCTACAACGA CTCTCCTG | 6498 |
| 6885 | GAGAGACG G CUAAGCGU | 1702 | ACGCTTAG GGCTAGCTACAACGA CGTCTCTC | 6499 |
| 6890 | ACGGCUAA G CGUAGGCU | 1703 | AGCCTACG GGCTAGCTACAACGA TTAGCCGT | 6500 |
| 6892 | GGCUAAGC G UAGGCUGG | 1704 | CCAGCCTA GGCTAGCTACAACGA GCTTAGCC | 6501 |
| 6896 | AAGCGUAG G CUGGCCAG | 1705 | CTGGCCAG GGCTAGCTACAACGA CTACGCTT | 6502 |
| 6900 | GUAGGCUG G CCAGGGGG | 1706 | CCCCCTGG GGCTAGCTACAACGA CAGCCTAC | 6503 |
| 6908 | GCCAGGGG G UCUCCCCC | 1707 | GGGGGAGA GGCTAGCTACAACGA CCCCTGGC | 6504 |
| 6924 | CCUCCUUG G CCAGCUCC | 1708 | GGAGCTGG GGCTAGCTACAACGA CAAGGAGG | 6505 |
| 6928 | CUUGGCGA G CUCCUCAG | 1709 | CTGAGGAG GGCTAGCTACAACGA TGGCCAAG | 6506 |
| 6936 | GCUCCUCA G CUAGCCAG | 1710 | CTGGCTAG GGCTAGCTACAACGA TGAGGAGC | 6507 |
| 6940 | CUCAGCUA G CCAGCUGU | 1711 | ACAGCTGG GGCTAGCTACAACGA TAGCTGAG | 6508 |
| 6944 | GCUAGCGA G CUGUCUGC | 1712 | GCAGACAG GGCTAGCTACAACGA TGGCTAGC | 6509 |
| 6947 | AGCCAGCU G UCUGCGCC | 1713 | GGCGCAGA GGCTAGCTACAACGA AGCTGGCT | 6510 |
| 6951 | AGCUGUCU G CGCCUUCU | 1714 | AGAAGGCG GGCTAGCTACAACGA AGACAGCT | 6511 |
| 6953 | CUGUCUGC G CCUUCUUC | 1715 | GAAGAAGG GGCTAGCTACAACGA GCAGACAG | 6512 |
| 6966 | CUUCGAAG G CGACAUAC | 1716 | GTATGTCG GGCTAGCTACAACGA CTTCGAAG | 6513 |
| 6969 | CGAAGGCG A CAUACAUU | 1717 | AATGTATG GGCTAGCTACAACGA CGCCTTCG | 6514 |
| 6971 | AAGGCGAC A UACAUUAC | 1718 | GTAATGTA GGCTAGCTACAACGA GTCGCCTT | 6515 |
| 6973 | GGCGACAU A CAUUACCC | 1719 | GGGTAATG GGCTAGCTACAACGA ATGTCGCC | 6516 |
| 6975 | CGACAUAC A UUACCCAA | 1720 | TTGGGTAA GGCTAGCTACAACGA GTATGTCG | 6517 |
| 6978 | CAUACAUU A CCCAAUAU | 1721 | ATATTGGG GGCTAGCTACAACGA AATGTATG | 6518 |
| 6983 | AUUACCCA A UAUGACUC | 1722 | GAGTCATA GGCTAGCTACAACGA TGGGTAAT | 6519 |
| 6985 | UACCCAAU A UGACUCCC | 1723 | GGGAGTCA GGCTAGCTACAACGA ATTGGGTA | 6520 |
| 6988 | CCAAUAUG A CUCCCCAG | 1724 | CTGGGGAG GGCTAGCTACAACGA CATATTGG | 6521 |
| 6997 | CUCCCCAG A CUUUGACC | 1725 | GGTCAAAG GGCTAGCTACAACGA CTGGGGAG | 6522 |
| 7003 | AGACUUUG A CCUCAUCG | 1726 | CGATGAGG GGCTAGCTACAACGA CAAAGTCT | 6523 |
| 7008 | UUGACCUC A UCGAGGCC | 1727 | GGCCTCGA GGCTAGCTACAACGA GAGGTCAA | 6524 |
| 7014 | UCAUCGAG G CCAACCUC | 1728 | GAGGTTGG GGCTAGCTACAACGA CTCGATGA | 6525 |
| 7018 | CGAGGCCA A CCUCCUGU | 1729 | ACAGGAGG GGCTAGCTACAACGA TGGCCTCG | 6526 |
| 7025 | AACCUCCU G UGGCGGCA | 1730 | TGCCGCGA GGCTAGCTACAACGA AGGAGGTT | 6527 |
| 7028 | CUCCUGUG G CGGCAGGA | 1731 | TCCTGCCG GGCTAGCTACAACGA CACAGGAG | 6528 |
| 7031 | CUGUGGCG G CAGGAGAU | 1732 | ATCTCCTG GGCTAGCTACAACGA CGCCACAG | 6529 |
| 7038 | GGCAGGAG A UGGGCGGU | 1733 | ACCGCCGA GGCTAGCTACAACGA CTCCTGCC | 6530 |
| 7042 | GGAGAUGG G CGGUAACA | 1734 | TGTTACCG GGCTAGCTACAACGA CCATCTCC | 6531 |
| 7045 | GAUGGGCG G UAACAUCA | 1735 | TGATGTTA GGCTAGCTACAACGA CGCCCATC | 6532 |
| 7048 | GGGCGGUA A CAUCACUC | 1736 | GAGTGATG GGCTAGCTACAACGA TACCGCCC | 6533 |
| 7050 | GCGGUAAC A UCACUCGC | 1737 | GCGAGTGA GGCTAGCTACAACGA GTTACCGC | 6534 |
| 7053 | GUAACAUC A CUCGCGUG | 1738 | CACGCGAG GGCTAGCTACAACGA GATGTTAC | 6535 |
| 7057 | CAUCACUC G CGUGGAGU | 1739 | ACTCCACG GGCTAGCTACAACGA GAGTGATG | 6536 |
| 7059 | UCACUCGC G UGGAGUCA | 1740 | TGACTCGA GGCTAGCTACAACGA GCGAGTGA | 6537 |
| 7064 | CGCGUGGA G UCAGAGAA | 1741 | TTCTCTGA GGCTAGCTACAACGA TCCACGCG | 6538 |
| 7072 | GUCAGAGA A UAAGGUAG | 1742 | CTACCTTA GGCTAGCTACAACGA TCTCTGAC | 6539 |
| 7077 | AGAAUAAG G UAGUUACC | 1743 | GGTAACTA GGCTAGCTACAACGA CTTATTCT | 6540 |
| 7080 | AUAAGGUA G UUACCCUG | 1744 | CAGGGTAA GGCTAGCTACAACGA TACCTTAT | 6541 |
| 7083 | AGGUAGUU A CCCUGCAC | 1745 | GTCCAGGG GGCTAGCTACAACGA AACTACCT | 6542 |
| 7090 | UACCCUGG A CUCUUUUG | 1746 | CAAAAGAG GGCTAGCTACAACGA CCAGGGTA | 6543 |
| 7099 | CUCUUUUG A CCCGCUUC | 1747 | GAAGCGGG GGCTAGCTACAACGA CAAAAGAG | 6544 |
| 7103 | UUUGACCC G CUUCGAGC | 1748 | GCTCCAAG GGCTAGCTACAACGA GGGTCAAA | 6545 |
| 7110 | CGCUUCGA G CGGAGGAG | 1749 | CTCCTCCG GGCTAGCTACAACGA TCGAAGCG | 6546 |
| 7120 | CGACCACG A UGAGAGAG | 1750 | CTCTCTCA GGCTAGCTACAACGA CCTCCTCC | 6547 |
| 7131 | AGAGAGAG G UGUCCAUU | 1751 | AATGGACA GGCTAGCTACAACGA CTCTCTCT | 6548 |
| 7133 | AGAGAGGU G UCCAUUCC | 1752 | GGAATGGA GGCTAGCTACAACGA ACCTCTCT | 6549 |
| 7137 | ACCUGUCC A UUCCGCCG | 1753 | CGCCGGAA GGCTAGCTACAACGA GCACACCT | 6550 |
| 7143 | CCAUUCCG G CCCAGAUC | 1754 | GATCTCCG GGCTAGCTACAACGA CGGAATGG | 6551 |
| 7149 | CGGCGGAG A UCCUGCGG | 1755 | CCGCAGGA GGCTAGCTACAACGA CTCCGCCG | 6552 |
| 7154 | GAGAUCCU G CGGAAAUC | 1756 | GATTTCCG GGCTAGCTACAACGA AGGATCTC | 6553 |
| 7160 | CUGCGGAA A UCCAAGAA | 1757 | TTCTTGCA GGCTAGCTACAACGA TTCCGCAG | 6554 |
| 7169 | UCCAAGAA G UUUCCUUC | 1758 | GAAGGAAA GGCTAGCTACAACGA TTCTTGGA | 6555 |
| 7179 | UUCCUUCA G CGUUACCC | 1759 | CGCTAACG GGCTAGCTACAACGA TGAACGAA | 6556 |
| 7181 | CCUUCAGC G UUACCCAU | 1760 | ATGGGTAA GGCTAGCTACAACGA GCTGAACG | 6557 |
| 7184 | UCAGCGUU A CCCAUAUG | 1761 | CATATGGG GGCTAGCTACAACGA AACGCTGA | 6558 |
| 7188 | CCUUACCC A UAUGGGCA | 1762 | TGCCCATA GGCTAGCTACAACGA GGGTAACG | 6559 |
| 7190 | UUACCCAU A UGCGCACG | 1763 | CGTGCCGA GGCTAGCTACAACGA ATGGGTAA | 6560 |
| 7194 | CCAUAUGG G CACGCCCG | 1764 | CGGGCGTG GGCTAGCTACAACGA CCATATGG | 6561 |
| 7196 | AUAUGGGC A CGCCCGGA | 1765 | TCCGGGCG GGCTAGCTACAACGA GCCCATAT | 6562 |
| 7198 | AUGGGCAC G CCCGGAUU | 1766 | AATCCGGG GGCTAGCTACAACGA GTGCCCAT | 6563 |
| 7204 | ACGCCCGG A UUACAACC | 1767 | GGTTGTAA GGCTAGCTACAACGA CCGGGCGT | 6564 |
| 7207 | CCCGGAUU A CAACCCUC | 1768 | GAGGGTTG GGCTAGCTACAACGA AATCCGGG | 6565 |
| 7210 | GGAUUACA A CCCUCCAC | 1769 | GTGGAGGG GGCTAGCTACAACGA TGTAATCC | 6566 |
| 7217 | AACCCUCC A CUACUAGA | 1770 | TCTAGTAG GGCTAGCTACAACGA GGAGGGTT | 6567 |
| 7220 | CCUCCACU A CUAGAGCC | 1771 | GGCTCTAG GGCTAGCTACAACGA AGTGGAGG | 6568 |
| 7226 | CUACUAGA G CCCUGGAA | 1772 | TTCCAGGG GGCTAGCTACAACGA TCTAGTAG | 6569 |
| 7237 | CUGGAAAG A CCCAGACU | 1773 | AGTCTGGG GGCTAGCTACAACGA CTTTCCAG | 6570 |
| 7243 | AGACCCAG A CUACGUCC | 1774 | GGACGTAG GGCTAGCTACAACGA CTGGGTCT | 6571 |
| 7246 | CCCAGACU A CGUCCCUC | 1775 | GAGGGACG GGCTAGCTACAACGA AGTCTGGG | 6572 |
| 7248 | CAGACUAC G UCCCUCCG | 1776 | CGGAGGGA GGCTAGCTACAACGA GTAGTCTG | 6573 |
| 7257 | UCCCUCCG G UGGUACAC | 1777 | GTGTACGA GGCTAGCTACAACGA CGGAGGGA | 6574 |
| 7260 | CUCCGGUG G UACACGGG | 1778 | CCCGTGTA GGCTAGCTACAACGA CACCGGAG | 6575 |
| 7262 | CCGGUGGU A CACGGGUG | 1779 | CACCCGTG GGCTAGCTACAACGA ACCACCGG | 6576 |
| 7264 | GGUGGUAC A CGGGUGCC | 1780 | GGCACCCG GGCTAGCTACAACGA GTACCACC | 6577 |
| 7268 | GUACACGG G UGCCCAUU | 1781 | AATGGGCA GGCTAGCTACAACGA CCGTGTAC | 6578 |
| 7270 | ACACGGGU G CCCAUUGC | 1782 | GCAATGGG GGCTAGCTACAACGA ACCCGTGT | 6579 |
| 7274 | GGGUGCCC A UUGCCACC | 1783 | GGTGGCAA GGCTAGCTACAACGA GGGCACCC | 6580 |
| 7277 | UGCCCAUU G CCACCUGC | 1784 | GCAGGTGG GGCTAGCTACAACGA AATGGGCA | 6581 |
| 7280 | CCAUUGCC A CCUGCCAA | 1785 | TTGGCAGG GGCTAGCTACAACGA GGCAATGG | 6582 |
| 7284 | UGCCACCU G CCAAGGCC | 1786 | GGCCTTGG GGCTAGCTACAACGA AGGTGGCA | 6583 |
| 7290 | CUGCCAAG G CCCCUCGA | 1787 | TGGAGGGG GGCTAGCTACAACGA CTTGGCAG | 6584 |
| 7299 | CCCCUCCA A UACCACCU | 1788 | AGGTGGTA GGCTAGCTACAACGA TGGAGGGG | 6585 |
| 7301 | CCUCCAAU A CCACCUCC | 1789 | GGAGGTGG GGCTAGCTACAACGA ATTGGAGG | 6586 |
| 7304 | CCAAUACC A CCUCCACG | 1790 | CGTGGAGG GGCTAGCTACAACGA GGTATTGG | 6587 |
| 7310 | CCACCUCC A CGGAGGAA | 1791 | TTCCTCCG GGCTAGCTACAACGA GGAGGTGG | 6588 |
| 7323 | GGAAGAGG A CGGUUGUU | 1792 | AACAACCG GGCTAGCTACAACGA CCTCTTCC | 6589 |
| 7326 | AGAGGACG G UUGUUCUG | 1793 | CAGAACAA GGCTAGCTACAACGA CGTCCTCT | 6590 |
| 7329 | GGACGGUU G UUCUGACA | 1794 | TGTCAGAA GGCTAGCTACAACGA AACCGTCC | 6591 |
| 7335 | UUGUUCUG A CAGAGUCC | 1795 | GGACTCTG GGCTAGCTACAACGA CAGAACAA | 6592 |
| 7340 | CUGACAGA G UCCACCGU | 1796 | ACGGTGGA GGCTAGCTACAACGA TCTGTCAG | 6593 |
| 7344 | CAGAGUCC A CCGUGUCU | 1797 | AGACACGG GGCTAGCTACAACGA GGACTCTG | 6594 |
| 7347 | AGUCCACC G UGUCUUCU | 1798 | AGAAGACA GGCTAGCTACAACGA GGTGGACT | 6595 |
| 7349 | UCCACCGU G UCUUCUGC | 1799 | GCAGAAGA GGCTAGCTACAACGA ACGGTGGA | 6596 |
| 7356 | UGUCUUCU G CCUUGGCG | 1800 | CGCCAAGG GGCTAGCTACAACGA AGAAGACA | 6597 |
| 7362 | CUGCCUUG G CGGAGCUC | 1801 | GAGCTCCG GGCTAGCTACAACGA CAAGGCAG | 6598 |
| 7367 | UUGGCGGA G CUCGCCAC | 1802 | GTGGCGAG GGCTAGCTACAACGA TCCGCCAA | 6599 |
| 7371 | CGGAGCUC G CCACAAAG | 1803 | CTTTGTGG GGCTAGCTACAACGA GAGCTCCG | 6600 |
| 7374 | AGCUCGCC A CAAAGACC | 1804 | GGTCTTTG GGCTAGCTACAACGA GGCGAGCT | 6601 |
| 7380 | CCACAAAG A CCUUCGGC | 1805 | GCCGAAGG GGCTAGCTACAACGA CTTTGTGG | 6602 |
| 7387 | GACCUUCG G CACCUCUG | 1806 | CAGAGCTG GGCTAGCTACAACGA CGAAGGTC | 6603 |
| 7390 | CUUCGGCA G CUCUGAAU | 1807 | ATTCAGAG GGCTAGCTACAACGA TGCCGAAG | 6604 |
| 7397 | AGCUCUGA A UCAUCGGC | 1808 | GCCGATGA GGCTAGCTACAACGA TCAGAGCT | 6605 |
| 7400 | UCUGAAUC A UCGGCCGC | 1809 | GCGGCCGA GGCTAGCTACAACGA GATTCAGA | 6606 |
| 7404 | AAUCAUCG G CCGCUGAU | 1810 | ATCAGCGG GGCTAGCTACAACGA CGATGATT | 6607 |
| 7407 | CAUCGGCC G CUGAUAGA | 1811 | TCTATCAG GGCTAGCTACAACGA GGCCGATG | 6608 |
| 7411 | GGCCGCUG A UAGAGGUA | 1812 | TACCTCTA GGCTAGCTACAACGA CAGCGGCC | 6609 |
| 7417 | UGAUAGAG G UACGGCAA | 1813 | TTGCCGTA GGCTAGCTACAACGA CTCTATCA | 6610 |
| 7419 | AUAGAGGU A CGGCAACC | 1814 | GGTTGCCG GGCTAGCTACAACGA ACCTCTAT | 6611 |
| 7422 | GAGGUACG G CAACCGCC | 1815 | GGCGGTTG GGCTAGCTACAACGA CGTACCTC | 6612 |
| 7425 | GUACGGCA A CCGCCCCC | 1816 | GGGGGCCG GGCTAGCTACAACGA TGCCGTAC | 6613 |
| 7428 | CGGCAACC G CCCCCCCC | 1817 | GGCGGGCG GGCTAGCTACAACGA GGTTGCCC | 6614 |
| 7438 | CCCCCCCG A CCAGACCU | 1818 | ACGTCTGG GGCTAGCTACAACGA CGGGGGGG | 6615 |
| 7443 | CCGACCAG A CCUCCAAU | 1819 | ATTGGAGG GGCTAGCTACAACGA CTGGTCGG | 6616 |
| 7450 | GACCUCCA A UGACGGUG | 1820 | CACCGTCA GGCTAGCTACAACGA TGGAGCTC | 6617 |
| 7453 | CUCCAAUG A CGGUGACG | 1821 | CGTCACCG GGCTAGCTACAACGA CATTGGAG | 6618 |
| 7456 | CAAUGACG G UGACGCAG | 1822 | CTGCGTCA GGCTAGCTACAACGA CGTCATTG | 6619 |
| 7459 | UGACGGUG A CGCAGGAU | 1823 | ATCCTGCG GGCTAGCTACAACGA CACCGTCA | 6620 |
| 7461 | ACGGUGAC G CAGGAUCC | 1824 | GGATCCTG GGCTAGCTACAACGA GTCACCGT | 6621 |
| 7466 | GACGCAGG A UCCGACGU | 1825 | ACGTCGGA GGCTAGCTACAACGA CCTGCGTC | 6622 |
| 7471 | AGGAUCCG A CGUUGAGU | 1826 | ACTCAACG GGCTAGCTACAACGA CGGATCCT | 6623 |
| 7473 | GAUCCGAC G UUGAGUCG | 1827 | CGACTCAA GGCTAGCTACAACGA GTCGGATC | 6624 |
| 7478 | GACGUUGA G UCGUACUC | 1828 | GAGTACGA GGCTAGCTACAACGA TCAACGTC | 6625 |
| 7481 | GUUGAGUC G UACUCCUC | 1829 | GAGGAGTA GGCTAGCTACAACGA GACTCAAC | 6626 |
| 7483 | UGAGUCGU A CUCCUCUA | 1830 | TAGAGGAG GGCTAGCTACAACGA ACGACTCA | 6627 |
| 7491 | ACUCCUCU A UGCCCCCC | 1831 | GGGGGGCA GGCTAGCTACAACGA AGAGGACT | 6628 |
| 7493 | UCCUCUAU G CCCCCCCU | 1832 | AGGGGGGG GGCTAGCTACAACGA ATAGAGGA | 6629 |
| 7511 | GAGGGGGA G CCGGGGGA | 1833 | TCCCCCGG GGCTAGCTACAACGA TCCCCCTC | 6630 |
| 7519 | GCCGGGGG A UCCCGAUC | 1834 | GATCGGGA GGCTAGCTACAACGA CCCCCGGC | 6631 |
| 7525 | GGAUCCCG A UCUCAGCG | 1835 | CGCTGAGA GGCTAGCTACAACGA CGGGATCC | 6632 |
| 7531 | CGAUCUCA G CGACGGGU | 1836 | ACCCGTCG GGCTAGCTACAACGA TGAGATCG | 6633 |
| 7534 | UCUCAGCG A CGGGUCUU | 1837 | AAGACCCG GGCTAGCTACAACGA CGCTGAGA | 6634 |
| 7538 | AGCGACGG G UCUUGGUC | 1838 | GACCAAGA GGCTAGCTACAACGA CCGTCGCT | 6635 |
| 7544 | GGGUCUUG G UCUACCGU | 1839 | ACGGTAGA GGCTAGCTACAACGA CAAGACCC | 6636 |
| 7548 | CUUGGUCU A CCGUGAGC | 1840 | GCTCACGG GGCTAGCTACAACGA AGACCAAG | 6637 |
| 7551 | GGUCUACC G UGAGCGAA | 1841 | TTCGCTCA GGCTAGCTACAACGA GGTAGACC | 6638 |
| 7555 | UACCGUGA G CGAAGAGG | 1842 | CCTCTTCG GGCTAGCTACAACGA TCACGGTA | 6639 |
| 7563 | GCGAAGAG G CUGGCGAG | 1843 | CTCGCCAG GGCTAGCTACAACGA CTCTTCGC | 6640 |
| 7567 | AGAGGCUG G CGAGGAUG | 1844 | CATCCTCG GGCTAGCTACAACGA CAGCCTCT | 6641 |
| 7573 | UGGCGAGG A UGUCGUCU | 1845 | AGACGACA GGCTAGCTACAACGA CCTCGCCA | 6642 |
| 7575 | GCGAGGAU G UCGUCUGC | 1846 | CCAGACGA GGCTAGCTACAACGA ATCCTCGC | 6643 |
| 7578 | AGGAUGUC G UCUGCUGC | 1847 | GCAGCAGA GGCTAGCTACAACGA GACATCCT | 6644 |
| 7582 | UGUCGUCU G CUGCUCGA | 1848 | TCGAGCAG GGCTAGCTACAACGA AGACGACA | 6645 |
| 7585 | CGUCUGCU G CUCGAUGU | 1849 | ACATCGAG GGCTAGCTACAACGA AGCAGACG | 6646 |
| 7590 | GCUGCUCG A UGUCCUAC | 1850 | GTAGGACA GGCTAGCTACAACGA CGAGCAGC | 6647 |
| 7592 | UGCUCGAU G UCCUACAC | 1851 | GTGTAGGA GGCTAGCTACAACGA ATCGAGCA | 6648 |
| 7597 | GAUGUCCU A CACAUGGA | 1852 | TCCATGTG GGCTAGCTACAACGA AGGACATC | 6649 |
| 7599 | UGUCCUAC A CAUGGACG | 1853 | CGTCCATG GGCTAGCTACAACGA GTAGGACA | 6650 |
| 7601 | UCCUACAC A UGGACGGG | 1854 | CCCGTCGA GGCTAGCTACAACGA GTGTAGGA | 6651 |
| 7605 | ACACAUGG A CGGGCGCC | 1855 | GGCGCCCG GGCTAGCTACAACGA CCATGTGT | 6652 |
| 7609 | AUGGACGG G CGCCCUGA | 1856 | TCAGGGCG GGCTAGCTACAACGA CCGTCCAT | 6653 |
| 7611 | GGACGGGC G CCCUGAUC | 1857 | GATCAGGG GGCTAGCTACAACGA GCCCGTCC | 6654 |
| 7617 | GCGCCCUG A UCACGCGA | 1858 | TGGCGTGA GGCTAGCTACAACGA CAGGGCGC | 6655 |
| 7620 | CCCUGAUC A CGCCAUGC | 1859 | GCATGGCG GGCTAGCTACAACGA GATCAGGG | 6656 |
| 7622 | CUGAUCAC G CCAUGCGC | 1860 | GCGCATGG GGCTAGCTACAACGA GTGATCAG | 6657 |
| 7625 | AUCACGCC A UGCGCUGC | 1861 | GCAGCGCA GGCTAGCTACAACGA GGCGTGAT | 6658 |
| 7627 | CACGCCAU G CGCUGCGG | 1862 | CCGCAGCG GGCTAGCTACAACGA ATGGCGTG | 6659 |
| 7629 | CGCCAUGC G CUGCGGAG | 1863 | CTCCGCAG GGCTAGCTACAACGA GCATGGCG | 6660 |
| 7632 | CAUGCGCU G CGGAGGAA | 1864 | TTCCTCCG GGCTAGCTACAACGA AGCGCATG | 6661 |
| 7642 | GGAGGAAA G CAAGUUGC | 1865 | GCAACTTG GGCTAGCTACAACGA TTTCCTCC | 6662 |
| 7646 | GAAAGCAA G UUGCCCAU | 1866 | ATGGGCAA GGCTAGCTACAACGA TTGCTTTC | 6663 |
| 7649 | AGCAAGUU G CCCAUCAA | 1867 | TTGATGGG GGCTAGCTACAACGA AACTTGCT | 6664 |
| 7653 | AGUUGCCC A UCAACGCG | 1868 | CGCGTTGA GGCTAGCTACAACGA GGGCAACT | 6665 |
| 7657 | GCCCAUCA A CGCGUUGA | 1869 | TCAACGCG GGCTAGCTACAACGA TGATGGGC | 6666 |
| 7659 | CCAUCAAC G CGUUGAGC | 1870 | GCTCAACG GGCTAGCTACAACGA CTTGATGC | 6667 |
| 7661 | AUCAACGC G UUGAGCAA | 1871 | TTGCTCAA GGCTAGCTACAACGA GCGTTGAT | 6668 |
| 7666 | CGCGUUGA G CAACUCUU | 1872 | AAGAGTTG GGCTAGCTACAACGA TCAACGCG | 6669 |
| 7669 | GUCGAGCA A CUCUUUCC | 1873 | GCAAACAG GGCTAGCTACAACGA TGCTCAAC | 6670 |
| 7676 | AACUCUUU G CUCCCUCA | 1874 | TGACCCAG GGCTAGCTACAACGA AAAGAGTT | 6671 |
| 7679 | UCUUUGCU G CGUCACGA | 1875 | TGCTCACG GGCTAGCTACAACGA AGCAAACA | 6672 |
| 7681 | UUUCCUGC G UCACCACA | 1876 | TCTGCTCA GGCTAGCTACAACGA GCAGCAAA | 6673 |
| 7684 | CCUCCCUC A CCACAACA | 1877 | TGTTCTCG GGCTAGCTACAACGA CACCCACC | 6674 |
| 7687 | GCGUCACC A CAACAUGG | 1878 | CCATGTTG GGCTAGCTACAACGA GGTGACCC | 6675 |
| 7690 | UCACCACA A CAUGGUCU | 1879 | AGACCATG GGCTAGCTACAACGA TGTGGTGA | 6676 |
| 7692 | ACCACAAC A UGGUCUAC | 1880 | GTAGACGA GGCTAGCTACAACGA GTTGTGGT | 6677 |
| 7695 | ACAACAUG G UCUACGCU | 1881 | AGCGTAGA GGCTAGCTACAACGA CATGTTGT | 6678 |
| 7699 | CAUGGUCU A CGCUACAA | 1882 | TTGTAGCG GGCTAGCTACAACGA AGACCATG | 6679 |
| 7701 | UGGUCUAC G CUACAACA | 1883 | TGTTGTAG GGCTAGCTACAACGA GTAGACCA | 6680 |
| 7704 | UCUACGCU A CAACAUCU | 1884 | AGATGTTG GGCTAGCTACAACGA AGCGTAGA | 6681 |
| 7707 | ACGCUACA A CAUCUCGC | 1885 | GCGAGATG GGCTAGCTACAACGA TGTAGCGT | 6682 |
| 7709 | GCUACAAC A UCUCGCAG | 1886 | CTGCGAGA GGCTAGCTACAACGA GTTGTAGC | 6683 |
| 7714 | AACAUCUC G CAGCGCAA | 1887 | TTGCGCTG GGCTAGCTACAACGA GAGATGTT | 6684 |
| 7717 | AUCUCGCA G CGGAAGCC | 1888 | GGCTTGCG GGCTAGCTACAACGA TGCGAGAT | 6685 |
| 7719 | CUCGCAGC G GAAGCCAG | 1889 | CTGGCTTG GGCTAGCTACAACGA GCTGCGAG | 6686 |
| 7723 | CAGCGCAA G CCAGCGGC | 1890 | GCCGCTGG GGCTAGCTACAACGA TTGCGCTG | 6687 |
| 7727 | GCAAGCGA G CGGCAGAA | 1891 | TTCTGCCG GGCTAGCTACAACGA TGGCTTGC | 6688 |
| 7730 | AGCCAGCG G CAGAAGAA | 1892 | TTCTTCTG GGCTAGCTACAACGA CGCTGGCT | 6689 |
| 7740 | AGAAGAAG G UCACCUUU | 1893 | AAAGGTGA GGCTAGCTACAACGA CTTCTTCT | 6690 |
| 7743 | AGAAGGUC A CCUUUGAC | 1894 | GTCAAAGG GGCTAGCTACAACGA GACCTTCT | 6691 |
| 7750 | CACCUUUG A CAGACUGC | 1895 | GCAGTCTG GGCTAGCTACAACGA CAAAGGTG | 6692 |
| 7754 | UUUGACAG A CUGCAAGU | 1896 | ACTTGCAG GGCTAGCTACAACGA CTGTCAAA | 6693 |
| 7757 | GACAGACU G CAAGUCCU | 1897 | AGGACTTG GGCTAGCTACAACGA AGTCTGTC | 6694 |
| 7761 | GACUGCAA G UCCUGGAC | 1898 | GTCCAGGA GGCTAGCTACAACGA TTGCAGTC | 6695 |
| 7768 | AGUCCUGG A CGACCACU | 1899 | AGTGGTCG GGCTAGCTACAACGA CCAGGACT | 6696 |
| 7771 | CCUGGACG A CCACUACC | 1900 | GGTAGTGG GGCTAGCTACAACGA CGTCCAGG | 6697 |
| 7774 | GGACGACC A CUACCGGG | 1901 | CCCGGTAG GGCTAGCTACAACGA GGTCGTCC | 6698 |
| 7777 | CGACCACU A CCGGGACG | 1902 | CGTCCCGG GGCTAGCTACAACGA AGTGGTCG | 6699 |
| 7783 | CUACCGGG A CGUGCUCA | 1903 | TGAGCACG GGCTAGCTACAACGA CCCGGTAG | 6700 |
| 7785 | ACCGGGAC G UGCUCAAG | 1904 | CTTGAGCA GGCTAGCTACAACGA GTCCCGGT | 6701 |
| 7787 | CGGGACGU G CUCAAGGA | 1905 | TCCTTGAG GGCTAGCTACAACGA ACGTCCCG | 6702 |
| 7797 | UCAAGGAG A UGAAGGCG | 1906 | CGCCTTCA GGCTAGCTACAACGA CTCCTTGA | 6703 |
| 7803 | AGAUGAAG G CGAAGGCG | 1907 | CGCCTTCG GGCTAGCTACAACGA CTTCATCT | 6704 |
| 7809 | AGGCGAAG G CGUCCACA | 1908 | TGTGGACG GGCTAGCTACAACGA CTTCGCCT | 6705 |
| 7811 | GCGAAGGC G UCCACAGU | 1909 | ACTGTGGA GGCTAGCTACAACGA GCCTTCGC | 6706 |
| 7815 | AGGCGUCC A CAGUUAAG | 1910 | CTTAACTG GGCTAGCTACAACGA GGACGCCT | 6707 |
| 7818 | CGUCCACA G UUAAGGCU | 1911 | AGCCTTAA GGCTAGCTACAACGA TGTGGACG | 6708 |
| 7824 | CAGUUAAG G CUAAACUU | 1912 | AAGTTTAG GGCTAGCTACAACGA CTTAACTG | 6709 |
| 7829 | AAGGCUAA A CUUCUAUC | 1913 | GATAGAAG GGCTAGCTACAACGA TTAGCCTT | 6710 |
| 7835 | AAACUUCU A UCCGUAGA | 1914 | TCTACGGA GGCTAGCTACAACGA AGAAGTTT | 6711 |
| 7839 | UUCUAUCC G UAGAGGAA | 1915 | TTCCTCTA GGCTAGCTACAACGA GGATAGAA | 6712 |
| 7848 | UAGAGGAA G CCUGCAGA | 1916 | TCTGCAGG GGCTAGCTACAACGA TTCCTCTA | 6713 |
| 7852 | GGAAGCCU G CAGACUGA | 1917 | TCAGTCTG GGCTAGCTACAACGA AGGCTTCC | 6714 |
| 7856 | GCCUGCAG A CUGACGCC | 1918 | GGCGTCAG GGCTAGCTACAACGA CTGCAGGC | 6715 |
| 7860 | GCAGACUG A CGCCCCGA | 1919 | TGGGGGCG GGCTAGCTACAACGA CAGTCTGC | 6716 |
| 7862 | AGACUGAC G CCCCCACA | 1920 | TGTGGGGG GGCTAGCTACAACGA GTCAGTCT | 6717 |
| 7868 | ACGCCCCC A CAUUCGGC | 1921 | GCCGAATG GGCTAGCTACAACGA GGGGGCGT | 6718 |
| 7870 | GCCCCCAC A UUCGGCGA | 1922 | TGGCCGAA GGCTAGCTACAACGA GTGGGGGC | 6719 |
| 7875 | CACAUUCG G CCAGGUCC | 1923 | GGACCTGG GGCTAGCTACAACGA CGAATGTG | 6720 |
| 7880 | UCCGCCAG G UCCAAAUU | 1924 | AATTTGGA GGCTAGCTACAACGA CTGGCCGA | 6721 |
| 7886 | AGGUCCAA A UUUGGUUA | 1925 | TAACCAAA GGCTAGCTACAACGA TTGGACCT | 6722 |
| 7891 | CAAAUUUG G UUAUGGGG | 1926 | CCCCATAA GGCTAGCTACAACGA CAAATTTG | 6723 |
| 7894 | AUUUGGUU A UGGGGCAA | 1927 | TTGCCCGA GGCTAGCTACAACGA AACCAAAT | 6724 |
| 7899 | GUUAUGGG G CAAAGGAC | 1928 | GTCCTTTG GGCTAGCTACAACGA CCCATAAC | 6725 |
| 7906 | GGCAAAGG A CGUCCGGA | 1929 | TCCGGACG GGCTAGCTACAACGA CCTTTGCC | 6726 |
| 7908 | CAAAGGAC G UCCGGAAC | 1930 | GTTCCGGA GGCTAGCTACAACGA GTCCTTTG | 6727 |
| 7915 | CGUCCGGA A CCUAUCGA | 1931 | TGGATAGG GGCTAGCTACAACGA TCCGGACG | 6728 |
| 7919 | CGGAACCU A UCCAGCGG | 1932 | CCGCTGGA GGCTAGCTACAACGA AGGTTCCG | 6729 |
| 7924 | CCUAUCGA G CGGGGCCG | 1933 | CGGCCCCG GGCTAGCTACAACGA TGGATAGG | 6730 |
| 7929 | CCAGCGGG G CCGUCAAC | 1934 | GTTGACGG GGCTAGCTACAACGA CCCGCTGG | 6731 |
| 7932 | GCGGGGCC G UCAACCAC | 1935 | GTGGTTGA GGCTAGCTACAACGA GGCCCCGC | 6732 |
| 7936 | GGCCGUCA A CCACAUCC | 1936 | GGATGTGG GGCTAGCTACAACGA TGACGGCC | 6733 |
| 7939 | CGUCAACC A CAUCCGCU | 1937 | AGCGGATG GGCTAGCTACAACGA GGTTGACG | 6734 |
| 7941 | UCAACCAC A UCCGCUCC | 1938 | GGAGCGGA GGCTAGCTACAACGA GTGGTTGA | 6735 |
| 7945 | CCACAUCC G CUCCGUGU | 1939 | ACACGGAG GGCTAGCTACAACGA GGATGTGG | 6736 |
| 7950 | UCCGCUCC G UGUGGAAG | 1940 | CTTCCACA GGCTAGCTACAACGA GGAGCGGA | 6737 |
| 7952 | CGCUCCGU G UGGAAGGA | 1941 | TCCTTCGA GGCTAGCTACAACGA ACGGAGCG | 6738 |
| 7960 | GUGGAAGG A CUUGCUGG | 1942 | CCAGCAAG GGCTAGCTACAACGA CCTTCCAC | 6739 |
| 7964 | AAGGACUU G CUGGAAGA | 1943 | TCTTCCAG GGCTAGCTACAACGA AAGTCCTT | 6740 |
| 7972 | GCUGGAAG A CACUGAGA | 1944 | TCTCAGTG GGCTAGCTACAACGA CTTCCAGC | 6741 |
| 7974 | UGGAAGAC A CUGAGACA | 1945 | TGTCTCAG GGCTAGCTACAACGA GTCTTCCA | 6742 |
| 7980 | ACACUGAG A CACCAAUU | 1946 | AATTGGTG GGCTAGCTACAACGA CTCAGTGT | 6743 |
| 7982 | ACUGAGAC A CCAAUUGA | 1947 | TCAATTGG GGCTAGCTACAACGA GTCTCAGT | 6744 |
| 7986 | AGACACCA A UUGAUACC | 1948 | GGTATCAA GGCTAGCTACAACGA TGGTGTCT | 6745 |
| 7990 | ACCAAUUG A UACCACGA | 1949 | TGGTGGTA GGCTAGCTACAACGA CAATTGGT | 6746 |
| 7992 | CAAUUGAU A CCACCAUC | 1950 | GATGGTGG GGCTAGCTACAACGA ATCAATTG | 6747 |
| 7995 | UUGAUACC A CCAUCAUG | 1951 | CATGATGG GGCTAGCTACAACGA GGTATCAA | 6748 |
| 7998 | AUACCACC A UCAUGGCA | 1952 | TGCCATGA GGCTAGCTACAACGA GGTGGTAT | 6749 |
| 8001 | CCACCAUC A UGGCAAAA | 1953 | TTTTGCGA GGCTAGCTACAACGA GATGGTGG | 6750 |
| 8004 | CCAUCAUG G CAAAAAAU | 1954 | ATTTTTTG GGCTAGCTACAACGA CATGATGG | 6751 |
| 8011 | GGCAAAAA A UGAGGUUU | 1955 | AAACCTCA GGCTAGCTACAACGA TTTTTGCC | 6752 |
| 8016 | AAAAUGAG G UUUUCUGC | 1956 | GCAGAAAA GGCTAGCTACAACGA CTCATTTT | 6753 |
| 8023 | GGUUUUCU G CGUCCAAC | 1957 | GTTGGACG GGCTAGCTACAACGA AGAAAACC | 6754 |
| 8025 | UUUUCUGC G UCCAACGA | 1958 | TGGTTGGA GGCTAGCTACAACGA GCAGAAAA | 6755 |
| 8030 | UGCGUCCA A CCAGAGAA | 1959 | TTCTCTGG GGCTAGCTACAACGA TGGACGCA | 6756 |
| 8044 | GAAAGGAG G CCGCAAGC | 1960 | GCTTGCGG GGCTAGCTACAACGA CTCCTTTC | 6757 |
| 8047 | AGGAGGCC G CAAGCCAG | 1961 | CTGGCTTG GGCTAGCTACAACGA GGCCTCCT | 6758 |
| 8051 | GGCCGCAA G CCAGCUCG | 1962 | CGAGCTGG GGCTAGCTACAACGA TTGCGGCC | 6759 |
| 8055 | GCAAGCGA G CUCGCCUU | 1963 | AAGGCGAG GGCTAGCTACAACGA TGGCTTGC | 6760 |
| 8059 | GCCAGCUC G CCUUAUCG | 1964 | CGATAAGG GGCTAGCTACAACGA GAGCTGGC | 6761 |
| 8064 | CUCGCCUU A UCGUGUUC | 1965 | GAACACGA GGCTAGCTACAACGA AAGGCGAG | 6762 |
| 8067 | GCCUUAUC G UGUUCCCA | 1966 | TGGGAACA GGCTAGCTACAACGA GATAAGGC | 6763 |
| 8069 | CUUAUCGU G UUCCCAGA | 1967 | TCTGGGAA GGCTAGCTACAACGA ACGATAAG | 6764 |
| 8077 | GUUCCCAG A CUUGGGGG | 1968 | CCCCCAAG GGCTAGCTACAACGA CTGGGAAC | 6765 |
| 8085 | ACUUGGGG G UUCGUGUG | 1969 | CACACGAA GGCTAGCTACAACGA CCCCAAGT | 6766 |
| 8089 | GGGGGUUC G UGUGUGCG | 1970 | CGCACACA GGCTAGCTACAACGA GAACCCCC | 6767 |
| 8091 | GGGUUCGU G UGUGCGAG | 1971 | CTCGCACA GGCTAGCTACAACGA ACGAACCC | 6768 |
| 8093 | GUUCGUGU G UGCGAGAA | 1972 | TTCTCGCA GGCTAGCTACAACGA ACACGAAC | 6769 |
| 8095 | UCGUGUGU G CGAGAAAA | 1973 | TTTTCTCG GGCTAGCTACAACGA ACACACCA | 6770 |
| 8103 | GCGAGAAA A UGGCCCUU | 1974 | AAGGGCGA GGCTAGCTACAACGA TTTCTCGC | 6771 |
| 8106 | AGAAAAUG G CCCUUUAC | 1975 | GTAAAGGG GGCTAGCTACAACGA CATTTTCT | 6772 |
| 8113 | GGCCCUUU A CGACGUCG | 1976 | CCACGTCG GGCTAGCTACAACGA AAAGGGCC | 6773 |
| 8116 | CCUUUACG A CGUGGUCU | 1977 | AGACCACG GGCTAGCTACAACGA CGTAAAGG | 6774 |
| 8118 | UUUACGAC G UGGUCUCC | 1978 | GGAGACGA GGCTAGCTACAACGA CTCGTAAA | 6775 |
| 8121 | ACCACCUG G UCUCCACC | 1979 | GGTGGAGA GGCTAGCTACAACGA CACGTCGT | 6776 |
| 8127 | UCGUCUCC A CCCUUCCU | 1980 | AGGAAGGG GGCTAGCTACAACGA GGAGACCA | 6777 |
| 8139 | UUCCUCAG G CCGUGAUG | 1981 | CATCACGG GGCTAGCTACAACGA CTGAGGAA | 6778 |
| 8142 | CUCACCCC G UGAUGGCC | 1982 | CCCCATCA GGCTAGCTACAACGA CCCCTCAC | 6779 |
| 8148 | ACCCCCUC A UCGCCUCU | 1983 | ACACCCGA GGCTAGCTACAACGA CACCCCCT | 6780 |
| 8149 | CGUCAUGG G CUCUUCAU | 1984 | ATGAAGAG GGCTAGCTACAACGA CCATCACG | 6781 |
| 8156 | GGCUCUUC A UACGGAUU | 1985 | AATCCGTA GGCTAGCTACAACGA GAAGAGCC | 6782 |
| 8158 | CUCUUCAU A CGCAUUCC | 1986 | GCAATCCG GGCTAGCTACAACGA ATCAAGAG | 6783 |
| 8162 | UCAUACGG A UUCCACUA | 1987 | TACTGGAA GGCTAGCTACAACGA CCGTATGA | 6784 |
| 8168 | GGAUUCGA G UACUCUCC | 1988 | CCACACTA GGCTAGCTACAACGA TGCAATCC | 6785 |
| 8170 | AUUCCAGU A CUCUCCUC | 1989 | CAGGAGAC GGCTAGCTACAACGA ACTGGAAT | 6786 |
| 8180 | UCUCCUCG G CAGCCCCU | 1990 | ACCCCCTC GGCTAGCTACAACGA CCACCAGA | 6787 |
| 8183 | CCUCCCGA G CGGGUUGA | 1991 | TCAACCCG GGCTAGCTACAACGA TCCCCACC | 6788 |
| 8187 | GGCAGCGG G UUGAGUUC | 1992 | GAACTCAA GGCTAGCTACAACGA CCGCTGCC | 6789 |
| 8192 | CGGGUUGA G UUCCUGGU | 1993 | ACCAGGAA GGCTAGCTACAACGA TCAACCCG | 6790 |
| 8199 | AGUUCCUG G UGAAUGCC | 1994 | GGCATTCA GGCTAGCTACAACGA CAGGAACT | 6791 |
| 8203 | CCUGGUGA A UGCCUGGA | 1995 | TCCAGGCA GGCTAGCTACAACGA TCACCAGG | 6792 |
| 8205 | UGGUGAAU G CCUGGAAA | 1996 | TTTCCAGG GGCTAGCTACAACGA ATTCACCA | 6793 |
| 8213 | GCCUGGAA A UCAAAGAA | 1997 | TTCTTTGA GGCTAGCTACAACGA TTCCAGGC | 6794 |
| 8222 | UCAAAGAA A UGCCCUAU | 1998 | ATAGGGCA GGCTAGCTACAACGA TTCTTTGA | 6795 |
| 8224 | AAAGAAAU G CCCUAUGG | 1999 | CCATAGGG GGCTAGCTACAACGA ATTTCTTT | 6796 |
| 8229 | AAUGCCCU A UGGGCUUU | 2000 | AAAGCCGA GGCTAGCTACAACGA AGGGCATT | 6797 |
| 8233 | CCCUAUGG G CUUUGCAU | 2001 | ATGCAAAG GGCTAGCTACAACGA CCATAGGG | 6798 |
| 8238 | UGGGCUUU G CAUAUGAC | 2002 | GTCATATG GGCTAGCTACAACGA AAAGCCCA | 6799 |
| 8240 | GGCUUUGC A UAUGACAC | 2003 | GTGTCATA GGCTAGCTACAACGA CCAAAGCC | 6800 |
| 8242 | CUUUGCAU A UGACACCC | 2004 | GGGTGTCA GGCTAGCTACAACGA ATGCAAAG | 6801 |
| 8245 | UGCAUAUG A CACCCGCU | 2005 | AGCGGGTG GGCTAGCTACAACGA CATATGCA | 6802 |
| 8247 | CAUAUGAC A CCCGCUGU | 2006 | ACAGCGGG GGCTAGCTACAACGA GTCATATG | 6803 |
| 8251 | UGACACCC G CUGUUUCG | 2007 | CGAAACAG GGCTAGCTACAACGA GGGTGTCA | 6804 |
| 8254 | CACCCGCU G UUUCGACU | 2008 | AGTCGAU& GGCTAGCTACAACGA AGCGGGTG | 6805 |
| 8260 | CUGUUUCG A CUCAACAG | 2009 | CTGTTGAG GGCTAGCTACAACGA CGAAACAG | 6806 |
| 8265 | UCCACUCA A CAGUCACC | 2010 | GGTGACTG GGCTAGCTACAACGA TGAGTCGA | 6807 |
| 8268 | ACUCAACA G UCACCGAG | 2011 | CTCGGTGA GGCTAGCTACAACGA TGTTGAGT | 6808 |
| 8271 | CAACAGUC A CCGAGAGU | 2012 | ACTCTCGG GGCTAGCTACAACGA GACTGTTG | 6809 |
| 8278 | CACCGAGA G UGACAUCC | 2013 | CGATGTCA GGCTAGCTACAACGA TCTCCGTG | 6810 |
| 8281 | CGAGAGUG A CAUCCGUG | 2014 | CACGGATG GGCTAGCTACAACGA CACTCTCG | 6811 |
| 8283 | AGAGUGAC A UCCGUGUC | 2015 | GACACGGA GGCTAGCTACAACGA GTCACTCT | 6812 |
| 8287 | UGACAUCC G UGUCGAGG | 2016 | CCTCGACA GGCTAGCTACAACGA GGATGTCA | 6813 |
| 8289 | ACAUCCGU G UCGAGGAG | 2017 | CTCCTCGA GGCTAGCTACAACGA ACGGATGT | 6814 |
| 8297 | GUCGAGGA G UCAAUUUA | 2018 | TAAATTGA GGCTAGCTACAACGA TCCTCGAC | 6815 |
| 8301 | AGGAGUCA A UUUACCAA | 2019 | TTGGTAAA GGCTAGCTACAACGA TGACTCCT | 6816 |
| 8305 | GUCAAUUU A CCAAUGUU | 2020 | AACATTGG GGCTAGCTACAACGA AAATTGAC | 6817 |
| 8309 | AUUUACCA A UGUUGUGA | 2021 | TCACAACA GGCTAGCTACAACGA TGGTAAAT | 6818 |
| 8311 | UUACCAAU G UUGUGACU | 2022 | AGTCACAA GGCTAGCTACAACGA ATTGGTAA | 6819 |
| 8314 | CCAAUGUU G UGACUUGG | 2023 | CCAAGTCA GGCTAGCTACAACGA AACATTGG | 6820 |
| 8317 | AUGUUGUG A CUUGGCCC | 2024 | GGGCCAAG GGCTAGCTACAACGA CACAACAT | 6821 |
| 8322 | GUGACUUG G CCCCCGAA | 2025 | TTCGGGGG GGCTAGCTACAACGA CAAGTCAC | 6822 |
| 8331 | CCCCCGAA G CCAGACAG | 2026 | CTGTCTGG GGCTAGCTACAACGA TTCGGGGG | 6823 |
| 8336 | GAAGCCAG A CAGGCCAU | 2027 | ATGGCCTG GGCTAGCTACAACGA CTGGCTTC | 6824 |
| 8340 | CCAGACAG G CCAUAAGG | 2028 | CCTTATCG GGCTAGCTACAACGA CTGTCTGG | 6825 |
| 8343 | GACAGGCC A UAAGGUCG | 2029 | CGACCTTA GGCTAGCTACAACGA GGCCTGTC | 6826 |
| 8348 | GCCAUAAG G UCGCUCAC | 2030 | GTGAGCGA GGCTAGCTACAACGA CTTATGGC | 6827 |
| 8351 | AUAAGGUC G CUCACAGA | 2031 | TCTGTGAG GGCTAGCTACAACGA GACCTTAT | 6828 |
| 8355 | GGUCGCUC A CAGAGCGG | 2032 | CCGCTCTG GGCTAGCTACAACGA GAGCGACC | 6829 |
| 8360 | CUCACAGA G CGGCUUUA | 2033 | TAAAGCCG GGCTAGCTACAACGA TCTGTGAG | 6830 |
| 8363 | ACAGACCG G CUUUAUAU | 2034 | ATATAAAG GGCTAGCTACAACGA CGCTCTGT | 6831 |
| 8368 | GCGGCUUU A UAUCGGGG | 2035 | CCCCGATA GGCTAGCTACAACGA AAAGCCGC | 6832 |
| 8370 | GGCUUUAU A UCGGGGGU | 2036 | ACCCCCGA GGCTAGCTACAACGA ATAAAGCC | 6833 |
| 8377 | UAUCGGGG G UCCUCUGA | 2037 | TCAGACGA GGCTAGCTACAACGA CCCCGATA | 6834 |
| 8385 | GUCCUCUG A CUAAUUCA | 2038 | TGAATTAG GGCTAGCTACAACGA CAGACCAC | 6835 |
| 8389 | UCUGACUA A UUCAAAAG | 2039 | CTTTTGAA GGCTAGCTACAACGA TAGTCAGA | 6836 |
| 8399 | UCAAAAGG G CACAACUG | 2040 | CAGTTCTG GGCTAGCTACAACGA CCTTTTGA | 6837 |
| 8404 | AGGGCAGA A CUGCGGUU | 2041 | AACCGCAG GGCTAGCTACAACGA TCTGCCCT | 6838 |
| 8407 | GCAGAACU G CGGUUAUC | 2042 | GATAACCG GGCTAGCTACAACGA AGTTCTGC | 6839 |
| 8410 | GAACUGCG G UUAUCGCC | 2043 | GGCGATAA GGCTAGCTACAACGA CGCAGTTC | 6840 |
| 8413 | CUGCGGUU A UCGCCGGU | 2044 | ACCGGCGA GGCTAGCTACAACGA AACCGCAG | 6841 |
| 8416 | CGGUUAUC G CCGGUGCC | 2045 | GGCACCGG GGCTAGCTACAACGA GATAACCG | 6842 |
| 8420 | UAUCGCCG G UGCCCCGC | 2046 | GCGCGGCA GGCTAGCTACAACGA CGGCGATA | 6843 |
| 8422 | UCGCCGGU G CCGCGCGA | 2047 | TCGCGCGG GGCTAGCTACAACGA ACCGGCGA | 6844 |
| 8425 | CCCGUGCC G CGCCACCG | 2048 | CGCTCGCG GGCTAGCTACAACGA GGCACCGG | 6845 |
| 8427 | GGUGCCGC G CGAGCGGC | 2049 | GCCGCTCG GGCTAGCTACAACGA GCGGCACC | 6846 |
| 8431 | CCGCGCGA G CGGCGUGC | 2050 | GCACGCCG GGCTAGCTACAACGA TCGCGCGG | 6847 |
| 8434 | CGCGAGCC G CGUGCUGA | 2051 | TCAGCACG GGCTAGCTACAACGA CGCTCCCG | 6848 |
| 8436 | CGAGCCCC G UGCUGACG | 2052 | CGTCAGCA GGCTAGCTACAACGA GCCGCTCG | 6849 |
| 8438 | ACCGGCGU G CUCACCAC | 2053 | CTCCTCAG GGCTAGCTACAACGA ACCCCGCT | 6850 |
| 8442 | GCGUGCUG A CGACCAGC | 2054 | CCTGGTCG GGCTAGCTACAACGA CAGCACGC | 6851 |
| 8445 | UGCUGACG A CCAGCUGU | 2055A | CAGCTGG GGCTAGCTACAACGA CCTCACCA | 6852 |
| 8449 | GACCACGA G CUCUCCUA | 2056 | TACCACAG GGCTAGCTACAACGA TGGTCGTC | 6853 |
| 8452 | CACCACCU G UCGUAAUA | 2057 | TATTACGA GGCTAGCTACAACGA AGCTGGTC | 6854 |
| 8455 | CAGCUGUG G UAAUACCC | 2058 | GGGTATTA GGCTAGCTACAACGA CACAGCTC | 6855 |
| 8458 | CUGUGGUA A UACCCUCA | 2059 | TGAGGGTA GGCTAGCTACAACGA TACCACAC | 6856 |
| 8460 | GUGGUAAU A CCCUCACA | 2060 | TGTGAGGC GGCTAGCTACAACGA ATTACCAC | 6857 |
| 8466 | AUACCCUC A CAUGUUAC | 2061 | GTAACATG GGCTAGCTACAACGA GAGGGTAT | 6858 |
| 8468 | ACCCUCAC A UGUUACUU | 2062 | AAGTAACA GGCTAGCTACAACGA GTGAGGGT | 6859 |
| 8470 | CCUCACAU G UUACUUGA | 2063 | TCAAGTAA GGCTAGCTACAACGA ATGTGACG | 6860 |
| 8473 | CACAUGUU A CUUGAAAG | 2064 | CTTTCAAC GGCTAGCTACAACGA AACATGTG | 6861 |
| 8481 | ACUUGAAA G CCUCUGCG | 2065 | CGCAGAGG GGCTAGCTACAACGA TTTCAACT | 6862 |
| 8487 | AAGCCUCU G CGGCCUGU | 2066 | ACAGGCCG GGCTAGCTACAACGA AGAGGCTT | 6863 |
| 8490 | CCUCUGCG G CCUGUCGA | 2067 | TCGACAGG GGCTAGCTACAACGA CGCACAGC | 6864 |
| 8494 | UGCCGCCU G UCGAGCUG | 2068 | CAGCTCGA GGCTAGCTACAACGA AGGCCGCA | 6865 |
| 8499 | CCUGUCGA G CUGCGAAG | 2069 | CTTCGCAG GGCTAGCTACAACGA TCGACAGG | 6866 |
| 8502 | CUCCACCU G CCAACCUC | 2070 | CACCTTCC GGCTAGCTACAACGA ACCTCCAC | 6867 |
| 8507 | CCUGCGAA G CUCCAGGA | 2071 | TCCTGGAG GGCTAGCTACAACGA TTCCCAGC | 6868 |
| 8515 | GCUCCAGG A CUGCACGA | 2072 | TCGTGCAC GGCTAGCTACAACGA CCTCGAGC | 6869 |
| 8518 | CCACGACU G CACGAUGC | 2073 | GCATCGTC GGCTAGCTACAACGA AGTCCTGG | 6870 |
| 8520 | AGGACUGC A CGAUGCUC | 2074 | GAGCATCG GGCTAGCTACAACGA GCAGTCCT | 6871 |
| 8523 | ACUCCACG A UGCUCCUC | 2075 | CACGACGA GGCTAGCTACAACGA CCTCCACT | 6872 |
| 8525 | UCCACCAU G CUCCUGUG | 2076 | CACACCAC GGCTAGCTACAACGA ATCCTGCA | 6873 |
| 8529 | CCAUCCUC G UCUCUGGA | 2077 | TCCACACA GGCTAGCTACAACGA GAGCATCG | 6874 |
| 8531 | AUGCUCCU G UGUCCAGA | 2078 | TCTCCACA GGCTAGCTACAACGA ACCACCAT | 6875 |
| 8533 | GCUCCUGU G UGGAGACG | 2079 | CGTCTCGA GGCTAGCTACAACGA ACACGAGC | 6876 |
| 8539 | CUGUCCAC A CCACCUGC | 2080 | CCAGCTCC GGCTAGCTACAACGA CTCCACAC | 6877 |
| 8542 | UGGAGACC A CCUGGUCC | 2081 | CGACCAGG GGCTAGCTACAACGA CGTCTCCA | 6878 |
| 8547 | ACCACCUC G UCCUUAUC | 2082 | CATAACGA GGCTAGCTACAACGA CACGTCGT | 6879 |
| 8550 | ACCUGGUC G UUAUCUGU | 2083 | ACAGATAA GGCTAGCTACAACGA GACCACCT | 6880 |
| 8553 | UGGUCCUC A UCUGUGAA | 2084 | TTCACAGA GGCTAGCTACAACGA AACCACCA | 6881 |
| 8557 | CCUUAUCU G UGAAACUC | 2085 | CACTTTCA GGCTAGCTACAACGA AGATAACG | 6882 |
| 8563 | CUCUGAAA G UGCGGCGA | 2086 | TCCCCGCA GGCTAGCTACAACGA TTTCACAG | 6883 |
| 8565 | CUGAAACU G CCGCGACC | 2087 | CCTCCCCG GGCTAGCTACAACGA ACTTTCAC | 6884 |
| 8571 | CUCCCCCC A CCCAACAC | 2088 | CTCTTCCG GGCTAGCTACAACGA CCCCGCAC | 6885 |
| 8581 | CCAAGAGG A CGCGGCGA | 2089 | TCGCCGCG GGCTAGCTACAACGA CCTCTTGG | 6886 |
| 8583 | AAGAGGAC G CCCCGAGC | 2090 | CCTCCCCC GGCTAGCTACAACGA GTCCTCTT | 6887 |
| 8586 | ACGACGCG G CCAGCCUA | 2091 | TACGCTCG GGCTAGCTACAACGA CCCCTCCT | 6888 |
| 8590 | CGCGGCGA G CCUACGAG | 2092 | CTCGTACG GGCTAGCTACAACGA TCGCCGCG | 6889 |
| 8594 | CCCACCCU A CGACUCUU | 2093 | AACACTCC GGCTAGCTACAACGA ACCCTCCC | 6890 |
| 8598 | CCCUACGA G UCUUCACC | 2094 | CCTCAACA GGCTAGCTACAACGA TCCTACCC | 6891 |
| 8604 | GAGUCUUC A CCGACGCU | 2095 | AGCCTCCC GGCTAGCTACAACGA GAACACTC | 6892 |
| 8610 | UCACGGAG G CUAUGACU | 2096 | AGTCATAG GGCTAGCTACAACGA CTCCGTGA | 6893 |
| 8613 | CCCACGCU A UCACUAGG | 2097 | CCTACTCA GGCTAGCTACAACGA AGCCTCCC | 6894 |
| 8616 | ACGCUAUG A CUAGGUAC | 2098 | GTACCTAG GGCTAGCTACAACGA CATAGCCT | 6895 |
| 8621 | AUCACUAC G UACUCUCC | 2099 | CCACACTA GGCTAGCTACAACGA CTACTCAT | 6896 |
| 8623 | GACUAGGU A CUCUGCCC | 2100 | GGGCAGAG GGCTAGCTACAACGA ACCTAGTC | 6897 |
| 8628 | GGUACUCU G CCCCCCCC | 2101 | GGGGGGGG GGCTAGCTACAACGA AGACTACC | 6898 |
| 8641 | CCCCCCGC A CCCCCCCC | 2102 | GGCGCGGG GGCTAGCTACAACGA CCCCGGGG | 6899 |
| 8645 | CCCCACCC G CCCCAACC | 2103 | CCTTGGGC GGCTAGCTACAACGA GGCTCCCC | 6900 |
| 8651 | CCGCCCCA A CCGGAAUA | 2104 | TATTCCGG GGCTAGCTACAACGA TGGGGCGG | 6901 |
| 8657 | CAACCGGA A UACGACUU | 2105 | AAGTCGTA GGCTAGCTACAACGA TCCGGTTG | 6902 |
| 8659 | ACCGGAAU A CGACUUGG | 2106 | CCAAGTCG GGCTAGCTACAACGA ATTCCGGT | 6903 |
| 8662 | GGAAUACG A CUUGGAGU | 2107 | ACTCCAAG GGCTAGCTACAACGA CGTATTCC | 6904 |
| 8669 | GACUUGGA G UUGAUAAC | 2108 | GTTATCAA GGCTAGCTACAACGA TCCAAGTC | 6905 |
| 8673 | UGGAGUUG A UAACAUCA | 2109 | TGATGTTA GGCTAGCTACAACGA CAACTCCA | 6906 |
| 8676 | AGUUGAUA A CAUCAUGC | 2110 | GCATGATG GGCTAGCTACAACGA TATCAACT | 6907 |
| 8678 | UUGAUAAC A UCAUGCUC | 2111 | GAGCATGA GGCTAGCTACAACGA GTTATCAA | 6908 |
| 8681 | AUAACAUC A UGCUCCUC | 2112 | GAGGAGCA GGCTAGCTACAACGA GATGTTAT | 6909 |
| 8683 | AACAUCAU G CUCCUCGA | 2113 | TGGAGGAG GGCTAGCTACAACGA ATGATGTT | 6910 |
| 8692 | CUCCUCCA A CGUAUCAG | 2114 | CTGATACG GGCTAGCTACAACGA TGGAGGAG | 6911 |
| 8694 | CCUCCAAC G UAUCAGUU | 2115 | AACTGATA GGCTAGCTACAACGA GTTGGAGG | 6912 |
| 8696 | UCCAACGU A UCAGUUGC | 2116 | GCAACTGA GGCTAGCTACAACGA ACGTTGGA | 6913 |
| 8700 | ACCUAUCA G UUGCACAC | 2117 | GTGTGCAA GGCTAGCTACAACGA TGATACGT | 6914 |
| 8703 | UAUCAGUU G CACACGAU | 2118 | ATCGTGTG GGCTAGCTACAACGA AACTGATA | 6915 |
| 8705 | UCAGUUGC A CACGAUGC | 2119 | GCATCGTG GGCTAGCTACAACGA GCAACTGA | 6916 |
| 8707 | AGUUGCAC A CGAUGCAU | 2120 | ATGCATCG GGCTAGCTACAACGA GTGCAACT | 6917 |
| 8710 | UGCACACG A UGCAUCUG | 2121 | CAGATGCA GGCTAGCTACAACGA CGTGTGCA | 6918 |
| 8712 | CACACGAU G CAUCUGGC | 2122 | GCCAGATG GGCTAGCTACAACGA ATCGTGTG | 6919 |
| 8714 | CACGAUGC A UCUGGCAA | 2123 | TTGCCAGA GGCTAGCTACAACGA GCATCGTG | 6920 |
| 8719 | UCCAUCUG G CAAAAGGG | 2124 | CCCTTTTG GGCTAGCTACAACGA CAGATGCA | 6921 |
| 8727 | GCAAAAGG G UGUACUAC | 2125 | GTAGTACA GGCTAGCTACAACGA CCTTTTGC | 6922 |
| 8729 | AAAAGGGU G UACUACCU | 2126 | AGGTAGTA GGCTAGCTACAACGA ACCCTTTT | 6923 |
| 8731 | AAGGGUGU A CUACCUCA | 2127 | TGAGGTAG GGCTAGCTACAACGA ACACCCTT | 6924 |
| 8734 | GGUGUACU A CCUCACCC | 2128 | GGGTGAGG GGCTAGCTACAACGA AGTACACC | 6925 |
| 8739 | ACUACCUC A CCCGUGAC | 2129 | GTCACGGG GGCTAGCTACAACGA GAGGTAGT | 6926 |
| 8743 | CCUCACCC G UGACCCGA | 2130 | TGGGGTCA GGCTAGCTACAACGA GGGTGAGG | 6927 |
| 8746 | CACCCGUG A CCCCACGA | 2131 | TGGTGGGG GGCTAGCTACAACGA CACGGGTG | 6928 |
| 8751 | GUGACCCC A CCACCCCC | 2132 | GGGGGTGG GGCTAGCTACAACGA GGGGTCAC | 6929 |
| 8754 | ACCCCACC A CCCCCCUU | 2133 | AAGGGGGG GGCTAGCTACAACGA GGTGGGGT | 6930 |
| 8763 | CCCCCCUU G CGCGGGCU | 2134 | AGCCCGCG GGCTAGCTACAACGA AAGGGGGG | 6931 |
| 8765 | CCCCUUGC G CGGGCUGC | 2135 | GCAGCCCG GGCTAGCTACAACGA GCAAGGGG | 6932 |
| 8769 | UUGCGCGG G CUGCGUGG | 2136 | CCACGCAG GGCTAGCTACAACGA CCGCGCAA | 6933 |
| 8772 | CGCGGGCU G CGUGGGAG | 2137 | CTCCCACG GGCTAGCTACAACGA AGCCCGCG | 6934 |
| 8774 | CGGGCUGC G UGGGAGAC | 2138 | GTCTCCGA GGCTAGCTACAACGA GCAGCCCG | 6935 |
| 8781 | CGUGGGAG A CAGCUAGA | 2139 | TCTAGCTG GGCTAGCTACAACGA CTCCCACG | 6936 |
| 8784 | GGGAGACA G CUAGAAGC | 2140 | GCTTCTAG GGCTAGCTACAACGA TGTCTCCC | 6937 |
| 8791 | AGCUAGAA G CACUCCAG | 2141 | CTGGAGTG GGCTAGCTACAACGA TTCTAGCT | 6938 |
| 8793 | CUAGAAGC A CUCCAGUC | 2142 | GACTGGAG GGCTAGCTACAACGA GCTTCTAG | 6939 |
| 8799 | GCACUCGA G UCAACUCC | 2143 | GGAGTTGA GGCTAGCTACAACGA TGGAGTGC | 6940 |
| 8803 | UCCAGUCA A CUCCUGGC | 2144 | GCCAGGAG GGCTAGCTACAACGA TGACTGGA | 6941 |
| 8810 | AACUCCUG G CUAGGCAA | 2145 | TTGCCTAG GGCTAGCTACAACGA CAGGAGTT | 6942 |
| 8815 | CUGGCUAG G CAACAUCA | 2146 | TGATGTTG GGCTAGCTACAACGA CTAGCCAG | 6943 |
| 8818 | GCUAGGCA A CAUCAUCA | 2147 | TGATGATG GGCTAGCTACAACGA TGGCTAGC | 6944 |
| 8820 | UAGGCAAC A UCAUCAUG | 2148 | CATGATGA GGCTAGCTACAACGA GTTGCCTA | 6945 |
| 8823 | GCAACAUC A UCAUGUUU | 2149 | AAACATGA GGCTAGCTACAACGA GATGTTGC | 6946 |
| 8826 | ACAUCAUC A UGUUUGCA | 2150 | TGCAAACA GGCTAGCTACAACGA GATGATGT | 6947 |
| 8828 | AUCAUCAU G UUUGCACC | 2151 | GGTGCAAA GGCTAGCTACAACGA ATGATGAT | 6948 |
| 8832 | UCAUGUUU G CACCCACU | 2152 | AGTGGGTG GGCTAGCTACAACGA AAACATGA | 6949 |
| 8834 | AUGUUUGC A CCCACUCU | 2153 | AGAGTGGG GGCTAGCTACAACGA GCAAACAT | 6950 |
| 8838 | UUGCACCC A CUCUAUGG | 2154 | CCATAGAG GGCTAGCTACAACGA GGGTGCAA | 6951 |
| 8843 | CCCACUCU A UGGGUAAG | 2155 | CTTACCGA GGCTAGCTACAACGA AGAGTGGG | 6952 |
| 8847 | CUCUAUGG G UAAGGAUG | 2156 | CATCCTTA GGCTAGCTACAACGA CCATAGAG | 6953 |
| 8853 | GGGUAAGG A UGAUUCUG | 2157 | CAGAATCA GGCTAGCTACAACGA CCTTACCC | 6954 |
| 8856 | UAAGGAUG A UUCUGAUG | 2158 | CATCAGAA GGCTAGCTACAACGA CATCCTTA | 6955 |
| 8862 | UGAUUCUG A UGACUCAC | 2159 | GTGAGTCA GGCTAGCTACAACGA CAGAATCA | 6956 |
| 8865 | UUCUGAUG A CUCACUUC | 2160 | GAAGTGAG GGCTAGCTACAACGA CATCAGAA | 6957 |
| 8869 | GAUGACUC A CUUCUUCU | 2161 | AGAAGAAG GGCTAGCTACAACGA GAGTCATC | 6958 |
| 8880 | UCUUCUCC A UCCUUCUA | 2162 | TAGAAGGA GGCTAGCTACAACGA GGAGAAGA | 6959 |
| 8889 | UCCUUCUA G CCCAGGAG | 2163 | CTCCTGGG GGCTAGCTACAACGA TAGAAGGA | 6960 |
| 8897 | GCCCAGGA G CAACUUGA | 2164 | TCAAGTTG GGCTAGCTACAACGA TCCTGGGC | 6961 |
| 8900 | CAGGAGCA A CUUGAGAA | 2165 | TTCTCAAG GGCTAGCTACAACGA TGCTCCTG | 6962 |
| 8910 | UUGAGAAA G CCCUAGAC | 2166 | GTCTAGGG GGCTAGCTACAACGA TTTCTCAA | 6963 |
| 8917 | AGCCCUAG A CUGCCAGA | 2167 | TCTCGCAG GGCTAGCTACAACGA CTAGGGCT | 6964 |
| 8920 | CCUAGACU G CCAGAUCU | 2168 | AGATCTGG GGCTAGCTACAACGA AGTCTAGG | 6965 |
| 8925 | ACUGCCAG A UCUACGGG | 2169 | CCCGTAGA GGCTAGCTACAACGA CTGGCAGT | 6966 |
| 8929 | CCAGAUCU A CGGGGCUU | 2170 | AAGCCCCG GGCTAGCTACAACGA AGATCTGG | 6967 |
| 8934 | UCUACGGG G CUUGUUAC | 2171 | GTAACAAG GGCTAGCTACAACGA CCCGTAGA | 6968 |
| 8938 | CGGGGCUU G UUACUCGA | 2172 | TGGAGTAA GGCTAGCTACAACGA AAGCCCCG | 6969 |
| 8941 | GGCUUGUU A CUCCAUUG | 2173 | CAATGGAG GGCTAGCTACAACGA AACAAGCC | 6970 |
| 8946 | GUUACUCC A UUGAGCGA | 2174 | TGGCTCAA GGCTAGCTACAACGA GGAGTAAC | 6971 |
| 8951 | UCCAUUGA G CCACUUGA | 2175 | TCAAGTGG GGCTAGCTACAACGA TCAATGGA | 6972 |
| 8954 | AUUGAGCC A CUUGACCU | 2176 | AGGTCAAG GGCTAGCTACAACGA GGCTCAAT | 6973 |
| 8959 | GCCACUUG A CCUACCUC | 2177 | GAGGTAGG GGCTAGCTACAACGA CAAGTGGC | 6974 |
| 8963 | CUUGACCU A CCUCAGAU | 2178 | ATCTGAGG GGCTAGCTACAACGA AGGTCAAG | 6975 |
| 8970 | UACCUCAG A UCAUUCAG | 2179 | CTGAATGA GGCTAGCTACAACGA CTGAGGTA | 6976 |
| 8973 | CUCAGAUC A UUCAGCGA | 2180 | TCGCTGAA GGCTAGCTACAACGA GATCTGAG | 6977 |
| 8978 | AUCAUUCA G CGACUCCA | 2181 | TGGAGTCG GGCTAGCTACAACGA TGAATGAT | 6978 |
| 8981 | AUUCAGCG A CUCCAUGG | 2182 | CCATGGAG GGCTAGCTACAACGA CGCTGAAT | 6979 |
| 8986 | GCGACUCC A UGGUCUUA | 2183 | TAAGACGA GGCTAGCTACAACGA GGAGTCGC | 6980 |
| 8989 | ACUCCAUG G UCUUAGCG | 2184 | CGCTAAGA GGCTAGCTACAACGA CATGGAGT | 6981 |
| 8995 | UGGUCUUA G CGCAUUUU | 2185 | AAAATGCG GGCTAGCTACAACGA TAAGACCA | 6982 |
| 8997 | CUCUUAGC G CAUUUUCA | 2186 | TGAAAATG GGCTAGCTACAACGA GCTAAGAC | 6983 |
| 8999 | CUUAGCGC A UUUUCACU | 2187 | AGTGAAAA GGCTAGCTACAACGA GCGCTAAG | 6984 |
| 9005 | GCAUUUUC A CUCCAUAG | 2188 | CTATGGAG GGCTAGCTACAACGA GAAAATGC | 6985 |
| 9010 | UUCACUCC A UAGUUACU | 2189 | AGTAACTA GGCTAGCTACAACGA GGAGTGAA | 6986 |
| 9013 | ACUCCAUA G UUACUCCC | 2190 | GGGAGTAA GGCTAGCTACAACGA TATGGAGT | 6987 |
| 9016 | CCAUAGUU A CUCCCCAG | 2191 | CTGGGGAG GGCTAGCTACAACGA AACTATGG | 6988 |
| 9025 | CUCCCCAG G UGAAAUCA | 2192 | TGATTTCA GGCTAGCTACAACGA CTGGGGAG | 6989 |
| 9030 | CAGGUGAA A UCAAUAGG | 2193 | CCTATTGA GGCTAGCTACAACGA TTCACCTG | 6990 |
| 9034 | UGAAAUCA A UAGGGUGG | 2194 | CCACCCTA GGCTAGCTACAACGA TGATTTCA | 6991 |
| 9039 | UCAAUAGG G UGGCAUCA | 2195 | TGATGCGA GGCTAGCTACAACGA CCTATTGA | 6992 |
| 9042 | AUAGGGUG G CAUCAUGC | 2196 | GCATGATG GGCTAGCTACAACGA CACCCTAT | 6993 |
| 9044 | AGGGUGGC A UCAUGCCU | 2197 | AGGCATGA GGCTAGCTACAACGA GCCACCCT | 6994 |
| 9047 | GUGGCAUC A UGCCUCAG | 2198 | CTGAGGCA GGCTAGCTACAACGA GATGCCAC | 6995 |
| 9049 | GGCAUCAU G CCUCAGGA | 2199 | TCCTGAGG GGCTAGCTACAACGA ATGATGCC | 6996 |
| 9059 | CUCAGGAA A CUUGGGGU | 2200 | ACCCCAAG GGCTAGCTACAACGA TTCCTGAG | 6997 |
| 9066 | AACUUGGG G UACCACCC | 2201 | GGGTGGTA GGCTAGCTACAACGA CCCAAGTT | 6998 |
| 9068 | CUUGGGGU A CCACCCUU | 2202 | AAGGGTGG GGCTAGCTACAACGA ACCCCAAG | 6999 |
| 9071 | GGGGUACC A CCCUUGCG | 2203 | CGCAAGGG GGCTAGCTACAACGA GGTACCCC | 7000 |
| 9077 | CCACCCUU G CGAACCUG | 2204 | CAGGTTCG GGCTAGCTACAACGA AAGGGTGG | 7001 |
| 9081 | CCUUGCCA A CCUGGAGA | 2205 | TCTCCAGG GGCTAGCTACAACGA TCGCAAGG | 7002 |
| 9089 | ACCUGGAG A CAUCGGGC | 2206 | GCCCGATG GGCTAGCTACAACGA CTCCAGGT | 7003 |
| 9091 | CUGGAGAC A UCGGGCCA | 2207 | TGGCCCGA GGCTAGCTACAACGA GTCTCCAG | 7004 |
| 9096 | GACAUCGG G CCAGAAGU | 2208 | ACTTCTGG GGCTAGCTACAACGA CCGATGTC | 7005 |
| 9103 | GGCCAGAA G UGUUCCCC | 2209 | CGCCAACA GGCTAGCTACAACGA TTCTCCCC | 7006 |
| 9105 | CCAGAACU G UUCGCGCU | 2210 | AGCGCGAA GGCTAGCTACAACGA ACTTCTGG | 7007 |
| 9109 | AACUGUUC G CGCUAAGC | 2211 | CCTTACCG GGCTAGCTACAACGA CAACACTT | 7008 |
| 9111 | GUGUUCGC G CUAAGCUA | 2212 | TAGCTTAG GGCTAGCTACAACGA GCCAACAC | 7009 |
| 9116 | CCCCCUAA G CUACUGUC | 2213 | CACACTAC GGCTAGCTACAACGA TTACCCCG | 7010 |
| 9119 | GCUAAGCU A CUGUCCCA | 2214 | TGGGACAG GGCTAGCTACAACGA AGCTTAGC | 7011 |
| 9122 | AAGCUACU G UCCCACCG | 2215 | CCCTGCGA GGCTAGCTACAACGA AGTAGCTT | 7012 |
| 9138 | GCGGGAGG G CCGCCACC | 2216 | GGTGGCGG GGCTAGCTACAACGA CCTCCCCC | 7013 |
| 9141 | CCAGGGCC G CCACCUGU | 2217 | ACAGCTGG GGCTAGCTACAACGA GGCCCTCC | 7014 |
| 9144 | GGGCCGCC A CCUGUGGC | 2218 | GCCACAGG GGCTAGCTACAACGA GGCGGCCC | 7015 |
| 9148 | CGCCACCU G UGGCAGGU | 2219 | ACCTGCGA GGCTAGCTACAACGA ACCTCGCG | 7016 |
| 9151 | CACCUGUG G CAGGUACC | 2220 | GGTACCTG GGCTAGCTACAACGA CACAGGTG | 7017 |
| 9155 | UGUGGCAG G UACCUCUU | 2221 | AAGAGGTA GGCTAGCTACAACGA CTGCCACA | 7018 |
| 9157 | UGGCAGGU A CCUCUUCA | 2222 | TGAAGAGG GGCTAGCTACAACGA ACCTGCCA | 7019 |
| 9166 | CCUCUUCA A CUGGGCAG | 2223 | CTGCCCAG GGCTAGCTACAACGA TGAAGAGG | 7020 |
| 9171 | UCAACUGG G CAGUAAAG | 2224 | CTTTACTG GGCTAGCTACAACGA CCAGTTGA | 7021 |
| 9174 | ACUGGGCA G UAAAGACC | 2225 | GGTCTTTA GGCTAGCTACAACGA TGCCCAGT | 7022 |
| 9180 | CAGUAAAG A CCAAACUC | 2226 | GAGTTTGG GGCTAGCTACAACGA CTTTACTG | 7023 |
| 9185 | AAGACCAA A CUCAAACU | 2227 | AGTTTGAG GGCTAGCTACAACGA TTGGTCTT | 7024 |
| 9191 | AAACUCAA A CUCACUCC | 2228 | GGAGTGAG GGCTAGCTACAACGA TTGAGTTT | 7025 |
| 9195 | UCAAACUC A CUCCAAUC | 2229 | GATTGGAG GGCTAGCTACAACGA GAGTTTGA | 7026 |
| 9201 | UCACUCCA A UCCCAGCU | 2230 | AGCTGGGA GGCTAGCTACAACGA TGGAGTGA | 7027 |
| 9207 | CAAUCCGA G CUGCGUCU | 2231 | AGACGCAG GGCTAGCTACAACGA TGGGATTG | 7028 |
| 9210 | UCCCAGCU G CGUCUCAG | 2232 | CTGAGACG GGCTAGCTACAACGA AGCTGGGA | 7029 |
| 9212 | CCAGCUGC G UCUCAGUU | 2233 | AACTGAGA GGCTAGCTACAACGA GCAGCTGG | 7030 |
| 9218 | GCGUCUCA G UUGGACUU | 2234 | AAGTCCAA GGCTAGCTACAACGA TGAGACGC | 7031 |
| 9223 | UCAGUUGG A CUUGUCCA | 2235 | TGGACAAG GGCTAGCTACAACGA CCAACTGA | 7032 |
| 9227 | UUGGACUU G UCCAACUG | 2236 | CAGTTGGA GGCTAGCTACAACGA AAGTCCAA | 7033 |
| 9232 | CUUGUCCA A CUGGUUCG | 2237 | CGAACCAG GGCTAGCTACAACGA TGGACAAG | 7034 |
| 9236 | UCCAACUG G UUCGUUGC | 2238 | GCAACGAA GGCTAGCTACAACGA CAGTTGGA | 7035 |
| 9240 | ACUGGUUC G UUGCUGGC | 2239 | GCCAGCAA GGCTAGCTACAACGA GAACCAGT | 7036 |
| 9243 | GGUUCGUU G CUGGCUAC | 2240 | GTAGCCAG GGCTAGCTACAACGA AACGAACC | 7037 |
| 9247 | CGUUGCUG G CUACAGCG | 2241 | CGCTGTAG GGCTAGCTACAACGA CAGCAACG | 7038 |
| 9250 | UGCUGGCU A CAGCGGGG | 2242 | CCCCGCTG GGCTAGCTACAACGA AGCCAGCA | 7039 |
| 9253 | UGGCUACA G CGGGGGAG | 2243 | CTCCCCCG GGCTAGCTACAACGA TGTAGCCA | 7040 |
| 9262 | CGGGGGAG A CGUGUAUC | 2244 | GATACACG GGCTAGCTACAACGA CTCCCCCG | 7041 |
| 9264 | GGGGAGAC G UGUAUCAC | 2245 | GTGATACA GGCTAGCTACAACGA GTCTCCCC | 7042 |
| 9266 | GGAGACGU G UAUCACAG | 2246 | CTGTGATA GGCTAGCTACAACGA ACGTCTCC | 7043 |
| 9268 | AGACGUGU A UCACAGCC | 2247 | GGCTGTGA GGCTAGCTACAACGA ACACGTCT | 7044 |
| 9271 | CGUGUAUC A CAGCCUGU | 2248 | ACAGGCTG GGCTAGCTACAACGA GATACACG | 7045 |
| 9274 | GUAUCACA G CCUGUCUC | 2249 | GAGACAGG GGCTAGCTACAACGA TGTGATAC | 7046 |
| 9278 | CACAGCCU G UCUCGUGC | 2250 | GCACGAGA GGCTAGCTACAACGA AGGCTGTG | 7047 |
| 9283 | CCUGUCUC G UGCCCGAC | 2251 | GTCGGGCA GGCTAGCTACAACGA GAGACAGG | 7048 |
| 9285 | UGUCUCGU G CCCGACCC | 2252 | GGGTCGGG GGCTAGCTACAACGA ACGAGACA | 7049 |
| 9290 | CGUGCCCG A CCCCGCUG | 2253 | CAGCGGGG GGCTAGCTACAACGA CGGGCACG | 7050 |
| 9295 | CCGACCCC G CUGGUUCA | 2254 | TGAACCAG GGCTAGCTACAACGA GGGGTCGG | 7051 |
| 9299 | CCCCGCUG G UUCAUGCU | 2255 | AGCATGAA GGCTAGCTACAACGA CAGCGGGG | 7052 |
| 9303 | GCUGGUUC A UGCUUUGC | 2256 | GCAAAGCA GGCTAGCTACAACGA GAACCAGC | 7053 |
| 9305 | UGGUUCAU G CUUUGCCU | 2257 | AGGCAAAG GGCTAGCTACAACGA ATGAACCA | 7054 |
| 9310 | CAUGCUUU G CCUACUCC | 2258 | GGAGTAGG GGCTAGCTACAACGA AAAGCATG | 7055 |
| 9314 | CUUUGCCU A CUCCUACU | 2259 | AGTAGGAG GGCTAGCTACAACGA AGGCAAAG | 7056 |
| 9320 | CUACUCCU A CUCUCCGU | 2260 | ACGGAGAG GGCTAGCTACAACGA AGGAGTAG | 7057 |
| 9327 | UACUCUCC G UAGGGGUA | 2261 | TACCCCTA GGCTAGCTACAACGA GGAGAGTA | 7058 |
| 9333 | CCGUAGGG G UAGGCAUC | 2262 | GATGCCTA GGCTAGCTACAACGA CCCTACGG | 7059 |
| 9337 | AGGGGUAG G CAUCUACC | 2263 | GGTAGATG GGCTAGCTACAACGA CTACCCCT | 7060 |
| 9339 | GGGUAGGC A UCUACCUG | 2264 | CAGGTAGA GGCTAGCTACAACGA GGCTACCC | 7061 |
| 9343 | AGGCAUCU A CCUGCUCC | 2265 | GGAGCAGG GGCTAGCTACAACGA AGATGCCT | 7062 |
| 9347 | AUCUACCU G CUCCCCAA | 2266 | TTGGGGAG GGCTAGCTACAACGA AGGTAGAT | 7063 |
| 9355 | GCUCCCCA A CCGAUGAA | 2267 | TTCATCGG GGCTAGCTACAACGA TGGGGAGC | 7064 |
| 9359 | CCCAACCG A UGAACAGG | 2268 | CCTGTTCA GGCTAGCTACAACGA CGGTTGGG | 7065 |
| 9363 | ACCGAUGA A CAGGGAGC | 2269 | GCTCCCTG GGCTAGCTACAACGA TCATCGGT | 7066 |
| 9370 | AACAGGGA G CUAAACAC | 2270 | GTGTTTAG GGCTAGCTACAACGA TCCCTGTT | 7067 |
| 9375 | GGAGCUAA A CACUCCAG | 2271 | CTGGAGTG GGCTAGCTACAACGA TTAGCTCC | 7068 |
| 9377 | AGCUAAAC A CUCCAGGC | 2272 | GCCTGGAG GGCTAGCTACAACGA GTTTAGCT | 7069 |
| 9384 | CACUCCAG G CCAAUAGG | 2273 | CCTATTGG GGCTAGCTACAACGA CTGGAGTG | 7070 |
| 9388 | CCAGGCCA A UAGGCCAU | 2274 | ATGGCCTA GGCTAGCTACAACGA TGGCCTGG | 7071 |
| 9392 | GCCAAUAG G CCAUCCCG | 2275 | CGGGATGG GGCTAGCTACAACGA CTATTGGC | 7072 |
| 9395 | AAUAGGCC A UCCCGUUU | 2276 | AAACGGGA GGCTAGCTACAACGA GGCCTATT | 7073 |
| 9400 | GCCAUCCC G UUUUUUUU | 2277 | AAAAAAAA GGCTAGCTACAACGA GGGATGGC | 7074 |

Input Sequence = HPCK1S1. Cut Site = R/Y
Arm Length = 8. Core Sequence=GGCTAGCTACAACGA
HPCK1S1 Hepatitis G virus (strain HCV-1b, Clone HCV-K1-S1), Complete genome; acc#
gi|1030702|dbj|D50483.1; 9410 nt

[0390] TABLE IV

HCV minus strand DNAzyme and Substrate Sequence

| | | | | |
|---|---|---|---|---|
| Pos | Substrate | Seq ID | DNAzyzne | Seq ID |

| | | | | |
|---|---|---|---|---|
| 9413 | AAAAAAAA A CGGGAUGG | 2278 | CCATCCCG GGCTAGCTACAACGA TTTTTTTT | 7075 |
| 9408 | AAAACGGG A UGGCCUAU | 2279 | ATAGGCCA GGCTAGCTACAACGA CCCGTTTT | 7076 |
| 9405 | ACGGGAUG G CCUAUUGG | 2280 | CCAATAGG GGCTAGCTACAACGA CATCCCGT | 7077 |
| 9401 | GAUGGCCU A UUGGCCUG | 2281 | CAGGCCAA GGCTAGCTACAACGA AGGCCATC | 7078 |
| 9397 | GCCUAUUG G CCUGGAGU | 2282 | ACTCCAGG GGCTAGCTACAACGA CAATAGGC | 7079 |
| 9390 | GGCCUGGA G UGUUUAGC | 2283 | GCTAAACA GGCTAGCTACAACGA TCCAGGCC | 7080 |
| 9388 | CCUGGAGU G UUUAGCUC | 2284 | GAGCTAAA GGCTAGCTACAACGA ACTCCAGG | 7081 |
| 9383 | AGUGUUUA G CUCCCUGU | 2285 | ACAGGGAG GGCTAGCTACAACGA TAAACACT | 7082 |
| 9376 | AGCUCCCU G UUCAUCGG | 2286 | CCAACCGA GGCTAGCTACAACGA AGGGAGCT | 7083 |
| 9372 | CCCUGUUC A UCGGUUGG | 2287 | CCAACCGA GGCTAGCTACAACGA GAACAGGG | 7084 |
| 9368 | GUUCAUCG G UUGGGGAG | 2288 | CTCCCCAA GGCTAGCTACAACGA CGATGAAC | 7085 |
| 9360 | GUUGGGGA G CAGGUAGA | 2289 | TCTACCTG GGCTAGCTACAACGA TCCCCAAC | 7086 |
| 9356 | GGGAGCAG G UAGAUGCC | 2290 | GGCATCTA GGCTAGCTACAACGA CTGCTCCC | 7087 |
| 9352 | GCAGGUAG A UGCCUACC | 2291 | GGTAGGCA GGCTAGCTACAACGA CTACCTGC | 7088 |
| 9350 | AGGUAGAU G CCUACCCC | 2292 | GGGGTAGG GGCTAGCTACAACGA ATCTACCT | 7089 |
| 9346 | AGAUGCCU A CCCCAUCG | 2293 | CGTAGGGG GGCTAGCTACAACGA AGGCATCT | 7090 |
| 9340 | CUACCCCU A CGGAGAGU | 2294 | ACTCTCCG GGCTAGCTACAACGA AGGGGTAG | 7091 |
| 9333 | UACGGAGA G UAGGAGUA | 2295 | TACTCCTA GGCTAGCTACAACGA TCTCCGTA | 7092 |
| 9327 | GAGUAGGA G UAGGCAAA | 2296 | TTTGCCTA GGCTAGCTACAACGA TCCTACTC | 7093 |
| 9323 | AGGAGUAG G CAAAGCAU | 2297 | ATGCTTTG GGCTAGCTACAACGA CTACTCCT | 7094 |
| 9318 | UAGGCAAA G CAUGAACC | 2298 | GGTTCATG GGCTAGCTACAACGA TTTGCCTA | 7095 |
| 9316 | GGCAAAGC A UGAACCAG | 2299 | CTGGTTCA GGCTAGCTACAACGA GCTTTGCC | 7096 |
| 9312 | AAGCAUGA A CCAGCGGG | 2300 | CCCGCTGG GGCTAGCTACAACGA TCATGCTT | 7097 |
| 9308 | AUGAACCA G CGGGGUCG | 2301 | CGACCCCG GGCTAGCTACAACGA TGGTTCAT | 7098 |
| 9303 | CCAGCGGG G UCGGGCAC | 2302 | GTGCCCGA GGCTAGCTACAACGA CCCGCTGG | 7099 |
| 9298 | GGGGUCGG G CACGAGAC | 2303 | GTCTCGTG GGCTAGCTACAACGA CCGACCCC | 7100 |
| 9296 | GGUCGGGC A CGAGACAG | 2304 | CTGTCTCG GGCTAGCTACAACGA GCCCGACC | 7101 |
| 9291 | GGCACGAG A CAGGCUGU | 2305 | ACAGCCTG GGCTAGCTACAACGA CTCGTGCC | 7102 |
| 9287 | CGAGACAG G CUGUGAUA | 2306 | TATCACAG GGCTAGCTACAACGA CTGTCTCG | 7103 |
| 9284 | GACAGGCU G UGAUACAC | 2307 | GTGTATCA GGCTAGCTACAACGA AGCCTGTC | 7104 |
| 9281 | AGGCUGUG A UACACGUC | 2308 | GACGTGTA GGCTAGCTACAACGA CACAGCCT | 7105 |
| 9279 | GCUGUGAU A CACGUCUC | 2309 | GAGACGTG GGCTAGCTACAACGA ATCACAGC | 7106 |
| 9277 | UGUGAUAC A CGUCUCCC | 2310 | GGGAGACG GGCTAGCTACAACGA GTATCACA | 7107 |
| 9275 | UGAUACAC G UCUCCCCC | 2311 | GGGGGAGA GGCTAGCTACAACGA GTGTATCA | 7108 |
| 9266 | UCUCCCCC G CUGUAGCC | 2312 | GGCTACAG GGCTAGCTACAACGA GGGGGAGA | 7109 |
| 9263 | CCCCCGCU G UAGCCAGC | 2313 | GCTGGCTA GGCTAGCTACAACGA AGCGGGGG | 7110 |
| 9260 | CCGCUGUA G CCAGCAAC | 2314 | GTTGCTGG GGCTAGCTACAACGA TACAGCGG | 7111 |
| 9256 | UGUAGCCA G CAACGAAC | 2315 | GTTCGTTG GGCTAGCTACAACGA TGGCTACA | 7112 |
| 9253 | AGCCAGCA A CGAACCAG | 2316 | CTGGTTCG GGCTAGCTACAACGA TGCTGGCT | 7113 |
| 9249 | AGCAACGA A CCAGUUGG | 2317 | CCAACTGG GGCTAGCTACAACGA TCGTTGCT | 7114 |
| 9245 | ACGAACCA G UUGGACAA | 2318 | TTGTCCAA GGCTAGCTACAACGA TGGTTCGT | 7115 |
| 9240 | CCAGUUGG A CAAGUCCA | 2319 | TGGACTTG GGCTAGCTACAACGA CCAACTGG | 7116 |
| 9236 | UUGGACAA G UCCAACUG | 2320 | CAGTTGGA GGCTAGCTACAACGA TTGTCCAA | 7117 |
| 9231 | CAAGUCCA A CUGAGACG | 2321 | CGTCTCAG GGCTAGCTACAACGA TGGACTTG | 7118 |
| 9225 | CAACUGAG A CGCAGCUG | 2322 | CAGCTGCG GGCTAGCTACAACGA CTCAGTTG | 7119 |
| 9223 | ACUGAGAC G CAGCUGGG | 2323 | CCCAGCTG GGCTAGCTACAACGA GTCTCAGT | 7120 |
| 9220 | GAGACGCA G CUGGGAUU | 2324 | AATCCCAG GGCTAGCTACAACGA TGCGTCTC | 7121 |
| 9214 | GGAUUGGA G UGAGUUUG | 2325 | CACTCCAA GGCTAGCTACAACGA CCCAGCTG | 7122 |
| 9208 | GGAUUGGA G UGAGUUUG | 2326 | CAAACTCA GGCTAGCTACAACGA TCCAATCC | 7123 |
| 9204 | UGGAGUGA G UUUGAGUU | 2327 | AACTCAAA GGCTAGCTACAACGA TCACTCCA | 7124 |
| 9198 | GAGUUUGA G UUUGGUCU | 2328 | AGACCAAA GGCTAGCTACAACGA TCAAACTC | 7125 |
| 9193 | UGAGUUUG G UCUUUACU | 2329 | AGTAAAGA GGCTAGCTACAACGA CAAACTCA | 7126 |
| 9187 | UGGUCUUU A CUGCCCAG | 2330 | CTGGGCAG GGCTAGCTACAACGA AAAGACCA | 7127 |
| 9184 | CAAGCCCA G CCCAGUUG | 2331 | CAACTGGG GGCTAGCTACAACGA AGTAAAGA | 7128 |
| 9179 | ACUGCCCA G UUGAAGAG | 2332 | CTCTTCAA GGCTAGCTACAACGA TGGGCAGT | 7129 |
| 9170 | UUGAAGAG G UACCUGCC | 2333 | GGCAGGTA GGCTAGCTACAACGA CTCTTCAA | 7130 |
| 9168 | GAAGAGGU A CCUGCCAC | 2334 | GTGGCAGG GGCTAGCTACAACGA ACCTCTTC | 7131 |
| 9164 | AGGUACCU G CCACAGGU | 2335 | ACCTGTGG GGCTAGCTACAACGA AGGTACCT | 7132 |
| 9161 | UACCUGCC A CAGGUGGC | 2336 | GCCACCTG GGCTAGCTACAACGA GGCAGGTA | 7133 |
| 9157 | UGCCACAG G UGGCGGCC | 2337 | GGCCGCCA GGCTAGCTACAACGA CTGTGGCA | 7134 |
| 9154 | CACAGGUG G CGGCCCUC | 2338 | GAGGGCCG GGCTAGCTACAACGA CACCTGTG | 7135 |
| 9151 | AGGUGGCG G CCCUCCCC | 2339 | GGGGAGGG GGCTAGCTACAACGA CGCCACCT | 7136 |
| 9135 | CCCCUGGG A CAGUAGCU | 2340 | AGCTACTG GGCTAGCTACAACGA CCCAGGGG | 7137 |
| 9132 | CUGGGACA G UAGCUUAG | 2341 | CTAAGCTA GGCTAGCTACAACGA TGTCCCAG | 7138 |
| 9129 | GGACAGUA G CUUAGCGC | 2342 | GCGCTAAG GGCTAGCTACAACGA TACTGTCC | 7139 |
| 9124 | GUAGCUUA G CGCGAACA | 2343 | TGTTCGCG GGCTAGCTACAACGA TAAGCTAC | 7140 |
| 9122 | AGCUUAGC G CGAACACU | 2344 | AGTGTTCG GGCTAGCTACAACGA GCTAAGCT | 7141 |
| 9118 | UAGCGCGA A CACUUCUG | 2345 | CAGAAGTG GGCTAGCTACAACGA TCGCGCTA | 7142 |
| 9116 | GCGCGAAC A CUUCUGGC | 2346 | GCCAGAAG GGCTAGCTACAACGA GTTCGCGC | 7143 |
| 9109 | CACUUCUG G CCCGAUGU | 2347 | ACATCGGG GGCTAGCTACAACGA CAGAAGTG | 7144 |
| 9104 | CUGGCCCG A UGUCUCCA | 2348 | TGGAGACA GGCTAGCTACAACGA CGGGCCAG | 7145 |
| 9102 | GGCCCGAU G UCUCCAGG | 2349 | CCTGGAGA GGCTAGCTACAACGA ATCGGGCC | 7146 |
| 9094 | GUCUCCAG G UUCGCAAG | 2350 | CTTGCGAA GGCTAGCTACAACGA CTGGAGAC | 7147 |
| 9090 | CCAGGUUC G CAAGGGUG | 2351 | CACCCTTG GGCTAGCTACAACGA GAACCTGG | 7148 |
| 9084 | UCGCAAGG G UGGUACCC | 2352 | GGGTACCA GGCTAGCTACAACGA CCTTGCGA | 7149 |
| 9081 | CAAGGGUG G UACCCCAA | 2353 | TTGGGGTA GGCTAGCTACAACGA CACCCTTG | 7150 |
| 9079 | AGGGUGGU A CCCCAAGU | 2354 | ACTTGGGG GGCTAGCTACAACGA ACCACCCT | 7151 |
| 9072 | UACCCCAA G UUUCCUGA | 2355 | TCAGGAAA GGCTAGCTACAACGA TTGGGGTA | 7152 |
| 9062 | UUCCUGAG G CAUGAUGC | 2356 | GCATCATG GGCTAGCTACAACGA CTCAGGAA | 7153 |
| 9060 | CCUGAGGC A UGAUGCCA | 2357 | TGGCATCA GGCTAGCTACAACGA GCCTCAGG | 7154 |
| 9057 | GAGGCAUG A UGCCACCC | 2358 | GGGTGGCA GGCTAGCTACAACGA CATGCCTC | 7155 |
| 9055 | GGCAUGAU G CCACCCUA | 2359 | TAGGGTGG GGCTAGCTACAACGA ATCATGCC | 7156 |
| 9052 | AUGAUGCC A CCCUAUUG | 2360 | CAATAGGG GGCTAGCTACAACGA GGCATCAT | 7157 |
| 9047 | GCCACCCU A UUGAUUUC | 2361 | GAAATCAA GGCTAGCTACAACGA AGGGTGGC | 7158 |
| 9043 | CCCUAUUG A UUUCACCU | 2362 | AGGTGAAA GGCTAGCTACAACGA CAATAGGG | 7159 |
| 9038 | UUGAUUUC A CCUGGGGA | 2363 | TCCCCAGG GGCTAGCTACAACGA GAAATCAA | 7160 |
| 9029 | CCUGGGGA G UAACUAUG | 2364 | CATAGTTA GGCTAGCTACAACGA TCCCCAGG | 7161 |
| 9026 | GGGGAGUA A CUAUGGAG | 2365 | CTCCATAG GGCTAGCTACAACGA TACTCCCC | 7162 |
| 9023 | GAGUAACU A UGGAGUGA | 2366 | TCACTCCA GGCTAGCTACAACGA AGTTACTC | 7163 |
| 9018 | ACUAUGGA G UGAAAAUG | 2367 | CATTTTCA GGCTAGCTACAACGA TCCATAGT | 7164 |
| 9012 | GAGUGAAA A UGCGCUAA | 2368 | TTAGCGCA GGCTAGCTACAACGA TTTCACTC | 7165 |
| 9010 | GUGAAAAU G CGCUAAGA | 2369 | TCTTAGCG GGCTAGCTACAACGA ATTTTCAC | 7166 |
| 9008 | GAAAAUGC G CUAAGACC | 2370 | GGTCTTAG GGCTAGCTACAACGA GCATTTTC | 7167 |
| 9002 | GCGCUAAG A CCAUGGAG | 2371 | CTCCATGG GGCTAGCTACAACGA CTTAGCGC | 7168 |
| 8999 | CUAAGACC A UGGAGUCG | 2372 | CGACTCCA GGCTAGCTACAACGA GGTCTTAG | 7169 |
| 8994 | ACCAUGGA G UCGCUGAA | 2373 | TTCAGCGA GGCTAGCTACAACGA TCCATGGT | 7170 |
| 8991 | AUGGAGUC G CUGAAUGA | 2374 | TCATTCAG GGCTAGCTACAACGA GACTCCAT | 7171 |
| 8986 | GUCGCUGA A UGAUCUGA | 2375 | TCAGATCA GGCTAGCTACAACGA TCAGCGAC | 7172 |
| 8983 | GCUGAAUG A UCUGAGGU | 2376 | ACCTCAGA GGCTAGCTACAACGA CATTCAGC | 7173 |
| 8976 | GAUCUGAG G UAGGUCAA | 2377 | TTGACCTA GGCTAGCTACAACGA CTCAGATC | 7174 |
| 8972 | UGAGGUAG G UCAAGUGG | 2378 | CCACTTGA GGCTAGCTACAACGA CTACCTCA | 7175 |
| 8967 | UAGGUCAA G UGGCUCAA | 2379 | TTGAGCCA GGCTAGCTACAACGA TTGACCTA | 7176 |
| 8964 | GUCAAGUG G CUCAAUGG | 2380 | CCATTGAG GGCTAGCTACAACGA CACTTGAC | 7177 |
| 8959 | GUGGCUCA A UGGAGUAA | 2381 | TTACTCCA GGCTAGCTACAACGA TGAGCCAC | 7178 |
| 8954 | UCAAUGGA G UAACAAGC | 2382 | GCTTGTTA GGCTAGCTACAACGA TCCATTGA | 7179 |
| 8951 | AUGGAGUA A CAAGCCCC | 2383 | GGGGCTTG GGCTAGCTACAACGA TACTCCAT | 7180 |
| 8947 | AGUAACAA G CCCCGUAG | 2384 | CTACGGGG GGCTAGCTACAACGA TTGTTACT | 7181 |
| 8942 | CAAGCCCC G UAGAUCUG | 2385 | CAGATCTA GGCTAGCTACAACGA GGGGCTTG | 7182 |
| 8938 | CCCCGUAG A UCUGGCAG | 2386 | CTGCCAGA GGCTAGCTACAACGA CTACGGGG | 7183 |
| 8933 | UAGAUCUG G CAGUCUAG | 2387 | CTAGACTG GGCTAGCTACAACGA CAGATCTA | 7184 |
| 8930 | AUCUGGCA G UCUAGGGC | 2388 | GCCCTAGA GGCTAGCTACAACGA TGCCAGAT | 7185 |
| 8923 | AGUCUAGG G CUUUCUCA | 2389 | TGAGAAAG GGCTAGCTACAACGA CCTAGACT | 7186 |
| 8913 | UUUCUCAA G UUGCUCCU | 2390 | AGGAGCAA GGCTAGCTACAACGA TTGAGAAA | 7187 |
| 8910 | CUCAAGUU G CUCCUGGG | 2381 | CCCAGGAG GGCTAGCTACAACGA AACTTGAG | 7188 |
| 8902 | GCUCCUGG G CUAGAAGG | 2392 | CCTTCTAG GGCTAGCTACAACGA CCAGGAGC | 7189 |
| 8893 | CUAGAAGG A UGGAGAAG | 2393 | CTTCTCCA GGCTAGCTACAACGA TTCTTCTC | 7190 |
| 8882 | GAGAAGAA G UGAGUCAU | 2394 | ATGACTCA GGCTAGCTACAACGA TTCTTCTC | 7191 |
| 8878 | AGAAGUGA G UCAUCAGA | 2395 | TCTGATGA GGCTAGCTACAACGA TCACTTCT | 7192 |
| 8875 | AGUGAGUC A UCAGAAUC | 2396 | GATTCTGA GGCTAGCTACAACGA GACTCACT | 7193 |
| 8869 | UCAUCAGA A UCAUCCUU | 2397 | AAGGATGA GGCTAGCTACAACGA TCTGATGA | 7194 |
| 8866 | UCAGAAUC A UCCUUACC | 2398 | GGTAAGGA GGCTAGCTACAACGA GATTCTGA | 7195 |
| 8860 | UCAUCCUU A CCCAUAGA | 2399 | TCTATGGG GGCTAGCTACAACGA AAGGATGA | 7196 |
| 8856 | CCUUACCC A UAGAGUGG | 2400 | CCACTCTA GGCTAGCTACAACGA GGGTAAGG | 7197 |
| 8851 | CCCAUAGA G UGGGUGCA | 2401 | TGCACCCA GGCTAGCTACAACGA TCTATGGG | 7198 |
| 8847 | UAGAGUGG G UGCAAACA | 2402 | TCATCATG GGCTAGCTACAACGA TTGCACCC | 7199 |
| 8845 | GAGUGGGU G CAAACAUG | 2403 | CATGTTTG GGCTAGCTACAACGA ACCCACTC | 7200 |
| 8841 | GGGUGCAA A CAUGAUGA | 2404 | TCATCATG GGCTAGCTACAACGA TTGCACCC | 7201 |
| 8839 | GUGCAAAC A UGAUGAUG | 2405 | CATCATCA GGCTAGCTACAACGA GTTTGCAC | 7202 |
| 8836 | CAAACAUG A UGAUGUUG | 2406 | CAACATCA GGCTAGCTACAACGA CATGTTTG | 7203 |
| 8833 | ACAUGAUG A UGUUGCCU | 2407 | AGGCAACA GGCTAGCTACAACGA CATCATGT | 7204 |
| 8831 | AUGAUGAU G UUGCCUAG | 2408 | CTAGGCAA GGCTAGCTACAACGA ATCATCAT | 7205 |
| 8828 | AUGAUGUU G CUUAGCCA | 2409 | TGGCTAGG GGCTAGCTACAACGA AACATCAT | 7206 |
| 8823 | GUUGCCAU G UUGACUGG | 2410 | ACTCCTGG GGCTAGCTACAACGA TAGGCAAC | 7207 |
| 8816 | AGCCAGGA G UUGACUGG | 2411 | CCAGTCAA GGCTAGCTACAACGA TCCTGGCT | 7208 |
| 8812 | AGGAGUUG A CUGGAGUG | 2412 | CACTCCAG GGCTAGCTACAACGA CAACTCCT | 7209 |
| 8806 | UGACUGGA G UGCUUCUA | 2413 | TAGAAGCA GGCTAGCTACAACGA TCCAGTCA | 7210 |
| 8804 | ACUGGAGU G CUUCUAGC | 2414 | GCTAGAAG GGCTAGCTACAACGA ACTCCAGT | 7211 |
| 8797 | UGCUUCUA G CUGUCUCC | 2415 | GGAGACAG GGCTAGCTACAACGA TAGAAGCA | 7212 |
| 8794 | UUCUAGCU G UCUCCCAC | 2416 | GTGGGAGA GGCTAGCTACAACGA AGCTAGAA | 7213 |
| 8787 | UGUCUCCC A CGCAGCCC | 2417 | GGGCTGCG GGCTAGCTACAACGA GGGAGACA | 7214 |
| 8785 | UCUCCCAC G CAGCCCGC | 2418 | GCGGGCTG GGCTAGCTACAACGA GTGGGAGA | 7215 |
| 8782 | CCCACGCA G CCCGCGCA | 2419 | TGCGCGGG GGCTAGCTACAACGA TGCGTGGG | 7216 |
| 8778 | CGCAGCCC G CGCAAGGG | 2420 | CCCTTGCG GGCTAGCTACAACGA GGGCTGCG | 7217 |
| 8776 | CAGCCCGC G CAAGGGGG | 2421 | CCCCCTTG GGCTAGCTACAACGA GCGGGCTG | 7218 |
| 8767 | CAAGGGGG G UGGUGGGG | 2422 | CCCCACCA GGCTAGCTACAACGA CCCCCTTG | 7219 |
| 8764 | GGGGGGUG G UGGGGUCA | 2423 | TGACCCCA GGCTAGCTACAACGA CACCCCCC | 7220 |
| 8759 | GUGGUGGG G UCACGGGU | 2424 | ACCCGTGA GGCTAGCTACAACGA CCCACCAC | 7221 |
| 8756 | GUGGGGUC A CGGGUGAG | 2425 | CTCACCCG GGCTAGCTACAACGA GACCCCAC | 7222 |
| 8752 | GGUCACGG G UGAGGUAG | 2426 | CTACCTCA GGCTAGCTACAACGA CCGTGACC | 7223 |
| 8747 | CGGGUGAG G UAGUACAC | 2427 | GTGTACTA GGCTAGCTACAACGA CTCACCCG | 7224 |
| 8744 | GUGAGGUA G UACACCCU | 2428 | AGGGTGTA GGCTAGCTACAACGA TACCTCAC | 7225 |
| 8742 | GAGGUAGU A CACCCUUU | 2429 | AAAGGGTG GGCTAGCTACAACGA ACTACCTC | 7226 |
| 8740 | GGUAGUAC A CCCUUUUG | 2430 | CAAAAGGG GGCTAGCTACAACGA GTACTACC | 7227 |
| 8732 | ACCCUUUU G CCAGAUGC | 2431 | GCATCTGG GGCTAGCTACAACGA AAAAGGGT | 7228 |
| 8727 | UUUGCCAG A UGCAUCGU | 2432 | ACGATGCA GGCTAGCTACAACGA CTGGCAAA | 7229 |
| 8725 | UGCCAGAU G CAUCGUGU | 2433 | ACACGATG GGCTAGCTACAACGA ATCTGGCA | 7230 |
| 8723 | CCAGAUGC A UCGUGUGC | 2434 | GCACACGA GGCTAGCTACAACGA GCATCTGG | 7231 |
| 8720 | GAUGCAUC G UGUGCAAC | 2435 | GTTGCACA GGCTAGCTACAACGA GATGCATC | 7232 |
| 8718 | UGCAUCGU G UGCAACUG | 2436 | CAGTTGCA GGCTAGCTACAACGA ACGATGCA | 7233 |
| 8716 | CAUCGUGU G CAACUGAU | 2437 | ATCAGTTG GGCTAGCTACAACGA ACACGATG | 7234 |
| 8713 | CGUGUGCA A CUGAUACG | 2438 | CGTATCAG GGCTAGCTACAACGA TGCACACG | 7235 |
| 8709 | UGCAACUG A UACGUUGG | 2439 | CCAACGTA GGCTAGCTACAACGA CAGTTGCA | 7236 |
| 8707 | CAACUGAU A CGUUGGAG | 2440 | CTCCAACG GGCTAGCTACAACGA ATCAGTTG | 7237 |
| 8705 | ACUGAUAC G UUGGAGGA | 2441 | TCCTCCAA GGCTAGCTACAACGA GTATCAGT | 7238 |
| 8696 | UUGGAGGA G CAUGAUGU | 2442 | ACATCATG GGCTAGCTACAACGA TCCTCCAA | 7239 |
| 8694 | GGAGGAGC A UGAUGUUA | 2443 | TAACATCA GGCTAGCTACAACGA GCTCCTCC | 7240 |
| 8691 | GGAGCAUG A UGUUAUCA | 2444 | TGATAACA GGCTAGCTACAACGA CATGCTCC | 7241 |
| 8689 | AGCAUGAU G UUAUCAAC | 2445 | GTTGATAA GGCTAGCTACAACGA ATCATGCT | 7242 |
| 8686 | AUGAUGUU A UCAACUCC | 2446 | GGAGTTGA GGCTAGCTACAACGA AACATCAT | 7243 |
| 8682 | UGUUAUCA A CUCCAAGU | 2447 | ACTTGGAG GGCTAGCTACAACGA TGATAACA | 7244 |
| 8675 | AACUCCAA G UCGUAUUC | 2448 | GAATACGA GGCTAGCTACAACGA TTGGAGTT | 7245 |
| 8672 | UCCAAGUC G UAUUCCGG | 2449 | CCGGAATA GGCTAGCTACAACGA GACTTGGA | 7246 |
| 8670 | CAAGUCGU A UUCCGGUU | 2450 | AACCGGAA GGCTAGCTACAACGA ACGACTTG | 7247 |
| 8664 | GUAUUCCG G UUGGGGCG | 2451 | CGCCCCAA GGCTAGCTACAACGA CGGAATAC | 7248 |
| 8658 | CGGUUGGG G CGGGUCCC | 2452 | GGGACCCG GGCTAGCTACAACGA CCCAACCG | 7249 |
| 8654 | UGGGGCGG G UCCCCGGG | 2453 | CCCGGGGA GGCTAGCTACAACGA CCGCCCCA | 7250 |
| 8641 | CGGGGGGG G CAGAGUAC | 2454 | GTACTCTG GGCTAGCTACAACGA CCCCCCCG | 7251 |
| 8636 | GGGGCAGA G UACCUAGU | 2455 | ACTAGGTA GGCTAGCTACAACGA TCTGCCCC | 7252 |
| 8634 | GGCAGAGU A CCUAGUCA | 2456 | TGACTAGG GGCTAGCTACAACGA ACTCTGCC | 7253 |
| 8629 | AGUACCUA G UCAUAGCC | 2457 | GGCTATGA GGCTAGCTACAACGA TAGGTACT | 7254 |
| 8626 | ACCAUGUC A UAGCCUCC | 2458 | GGAGGCTA GGCTAGCTACAACGA GACTAGGT | 7255 |
| 8623 | UAGUCAUA G CCUCCGUG | 2459 | CACGGAGG GGCTAGCTACAACGA TATGACTA | 7256 |
| 8617 | UAGCCUCC G UGAAGACU | 2460 | AGTCTTCA GGCTAGCTACAACGA GGAGGCTA | 7257 |
| 8611 | CCGUGAAG A CUCGUAGG | 2461 | CCTACGAG GGCTAGCTACAACGA CTTCACGG | 7258 |
| 8607 | GAAGACUC G UAGGCUCG | 2462 | CGAGCCTA GGCTAGCTACAACGA GAGTCTTC | 7259 |
| 8603 | ACUCGUAG G CUCGCCGC | 2463 | GCGGCGAG GGCTAGCTACAACGA CTACGAGT | 7260 |
| 8599 | GUAGGCUC G CCGCGUCC | 2464 | GGACGCGG GGCTAGCTACAACGA GAGCCTAC | 7261 |
| 8596 | GGCUCGCC G CGUCCUCU | 2465 | AGAGGACG GGCTAGCTACAACGA GGCGAGCC | 7262 |
| 8594 | CUCGCCGC G UCCUCUUG | 2466 | CAAGAGGA GGCTAGCTACAACGA GCGGCGAG | 7263 |
| 8584 | CCUCUUGG G UCCCCGCA | 2467 | TGCGGGGA GGCTAGCTACAACGA CCAAGAGG | 7264 |
| 8578 | GGGUCCCC G CACUUUCA | 2468 | TGAAAGTG GGCTAGCTACAACGA GGGGACCC | 7265 |
| 8576 | GUCCCCGC A CUUUCACA | 2469 | TGTGAAAG GGCTAGCTACAACGA GCGGGGAC | 7266 |
| 8570 | GCACUUUC A CAGAUAAC | 2470 | GTTATCTG GGCTAGCTACAACGA GAAAGTGC | 7267 |
| 8566 | UUUCACAG A UAACGACC | 2471 | GGTCGTTA GGCTAGCTACAACGA CTGTGAAA | 7268 |
| 8563 | CACAGAUA A CGACCAGG | 2472 | CCTGGTCG GGCTAGCTACAACGA TATCTGTG | 7269 |
| 8560 | AGAUAACG A CCAGGUCG | 2473 | CGACCTGG GGCTAGCTACAACGA CGTTATCT | 7270 |
| 8555 | ACGACCAG G UCGUCUCC | 2474 | GGAGACGA GGCTAGCTACAACGA CTGGTCGT | 7271 |
| 8552 | ACCAGGUC G UCUCCACA | 2475 | TGTGGAGA GGCTAGCTACAACGA GACCTGGT | 7272 |
| 8546 | UCGUCUCC A CACACGAG | 2476 | CTCGTGTG GGCTAGCTACAACGA GGAGACGA | 7273 |
| 8544 | GUCUCCAC A CACGAGCA | 2477 | TGCTCGTG GGCTAGCTACAACGA GTGGAGAC | 7274 |
| 8542 | CUCCACAC A CGAGCAUC | 2478 | GATGCTCG GGCTAGCTACAACGA GTGTGGAG | 7275 |
| 8538 | ACACACGA G CAUCGUGC | 2479 | GCACGATG GGCTAGCTACAACGA TCGTGTGT | 7276 |
| 8536 | ACACGAGC A UCGUGCAG | 2480 | CTGCACGA GGCTAGCTACAACGA GCTCGTGT | 7277 |
| 8533 | CGAGCAUC G UGCAGUCC | 2481 | GGACTGCA GGCTAGCTACAACGA GATGCTCG | 7278 |
| 8531 | AGCAUCGU G CAGUCCUG | 2482 | CAGGACTG GGCTAGCTACAACGA ACGATGCT | 7279 |
| 8528 | AUCGUGCA G UCCUGGAG | 2483 | CTCCAGGA GGCTAGCTACAACGA TGCACGAT | 7280 |
| 8520 | GUCCUGGA G CUUCGCAG | 2484 | CTGCGAAG GGCTAGCTACAACGA TCCAGGAC | 7281 |
| 8515 | GGAGCUUC G CAGCUCGA | 2485 | TCGAGCTG GGCTAGCTACAACGA GAAGCTCC | 7282 |
| 8512 | GCUUCGCA G CUCGACAG | 2486 | CTGTCGAG GGCTAGCTACAACGA TGCGAAGC | 7283 |
| 8507 | GCAGCUCG A CAGGCCGC | 2487 | GCGGCCTG GGCTAGCTACAACGA CGAGCTGC | 7284 |
| 8503 | CUCGACAG G CCGCAGAG | 2488 | CTCTGCGG GGCTAGCTACAACGA CTGTCGAG | 7285 |
| 8500 | GACAGGCC G CAGAGGCU | 2489 | AGCCTCTG GGCTAGCTACAACGA GGCCTGTC | 7286 |
| 8494 | CCGCAGAG G CUUUCAAG | 2490 | CTTGAAAG GGCTAGCTACAACGA CTCTGCGG | 7287 |
| 8486 | GCUUUCAA G UAACAUGU | 2491 | ACATGTTA GGCTAGCTACAACGA TTGAAAGC | 7288 |
| 8483 | UUCAAGUA A CAUGUGAG | 2492 | CTCACATG GGCTAGCTACAACGA TACTTGAA | 7289 |
| 8481 | CAAGUAAC A UGUGAGGG | 2493 | CCCTCACA GGCTAGCTACAACGA GTTACTTG | 7290 |
| 8479 | AGUAACAU G UGAGGGUA | 2494 | TACCCTCA GGCTAGCTACAACGA ATGTTACT | 7291 |
| 8473 | AUGUGAGG G UAUUACCA | 2495 | TGGTAATA GGCTAGCTACAACGA CCTCACAT | 7292 |
| 8471 | GUGAGGGU A UUACCACA | 2496 | TGTGGTAA GGCTAGCTACAACGA ACCCTCAC | 7293 |
| 8468 | AGGGUAUU A CCACAGCU | 2497 | AGCTGTGG GGCTAGCTACAACGA AATACCCT | 7294 |
| 8465 | GUAUUACC A CAGCUGGU | 2498 | ACCAGCTG GGCTAGCTACAACGA GGTAATAC | 7295 |
| 8462 | UUACCACA G CUGGUCGU | 2499 | ACGACCAG GGCTAGCTACAACGA TGTGGTAA | 7296 |
| 8458 | CACAGCUG G UCGUCAGC | 2500 | GCTGACGA GGCTAGCTACAACGA CAGCTGTG | 7297 |
| 8455 | AGCUGGUC G UCAGCACG | 2501 | CGTGCTGA GGCTAGCTACAACGA GACCAGCT | 7298 |
| 8451 | GGUCGUCA G CACGCCGC | 2502 | GCGGCGTG GGCTAGCTACAACGA TGACGACC | 7299 |
| 8449 | UCGUCAGC A CGCCGCUC | 2503 | GAGCGGCG GGCTAGCTACAACGA GCTGACGA | 7300 |
| 8447 | GUCAGCAC G CCGCUCGC | 2504 | GCGAGCGG GGCTAGCTACAACGA GTGCTGAC | 7301 |
| 8444 | AGCACGCC G CUCGCGCG | 2505 | CGCGCGAG GGCTAGCTACAACGA GGCGTGCT | 7302 |
| 8440 | CGCCGCUC G CGCGGCAC | 2506 | GTGCCGCG GGCTAGCTACAACGA GAGCGGCG | 7303 |
| 8438 | CCGCUCGC G CGGCACCG | 2507 | CGGTGCCG GGCTAGCTACAACGA GCGAGCGG | 7304 |
| 8435 | CUCGCGCG G CACCGGCG | 2508 | CGCCGGTG GGCTAGCTACAACGA CGCGCGAG | 7305 |
| 8433 | CGCGCGGC A CCGGCGAU | 2509 | ATCGCCGG GGCTAGCTACAACGA GCCGCGCG | 7306 |
| 8429 | CGGCACCG G CGAUAACC | 2510 | GGTTATCG GGCTAGCTACAACGA CGGTGCCG | 7307 |
| 8426 | CACCGGCG A UAACCGCA | 2511 | TGCGGTTA GGCTAGCTACAACGA CGCCGGTG | 7308 |
| 8423 | CGGCGAUA A CCGCAGUU | 2512 | AACTGCGG GGCTAGCTACAACGA TATCGCCG | 7309 |
| 8420 | CGAUAACC G CAGUUCUG | 2513 | CAGAACTG GGCTAGCTACAACGA GGTTATCG | 7310 |
| 8417 | UAACCGCA G UUCUGCCC | 2514 | GGGCAGAA GGCTAGCTACAACGA TGCGGTTA | 7311 |
| 8412 | GCAGUUCU G CCCUUUUG | 2515 | CAAAAGGG GGCTAGCTACAACGA AGAACTGC | 7312 |
| 8402 | CCUUUUGA A UUAGUCAG | 2516 | CTGACTAA GGCTAGCTACAACGA TCAAAAGG | 7313 |
| 8398 | UUGAAUUA G UCAGAGGA | 2517 | TCCTCTGA GGCTAGCTACAACGA TAATTCAA | 7314 |
| 8390 | GUCAGAGG A CCCCCGAU | 2518 | ATCGGGGG GGCTAGCTACAACGA CCTCTGAC | 7315 |
| 8383 | GACCCCCG A UAUAAAGC | 2519 | GCTTTATA GGCTAGCTACAACGA CGGGGGTC | 7316 |
| 8381 | CCCCCGAU A UAAAGCCG | 2520 | CGGCTTTA GGCTAGCTACAACGA ATCGGGGG | 7317 |
| 8376 | GAUAUAAA G CCGCUCUG | 2521 | CAGAGCGG GGCTAGCTACAACGA TTTATATC | 7318 |
| 8373 | AUAAAGCC G CUCUGUGA | 2522 | TCACAGAG GGCTAGCTACAACGA GGCTTTAT | 7319 |
| 8368 | GCCGCUCU G UGAGCGAC | 2523 | GTCGCTCA GGCTAGCTACAACGA AGAGCGGC | 7320 |
| 8364 | CUCUGUGA G CGACCUUA | 2524 | TAAGGTCG GGCTAGCTACAACGA TCACAGAG | 7321 |
| 8361 | UGUGAGCG A CCUUAUGG | 2525 | CCATAAGG GGCTAGCTACAACGA CGCTCACA | 7322 |
| 8356 | GCGACCUU A UGGCCUGU | 2526 | ACAGGCCA GGCTAGCTACAACGA AAGGTCGC | 7323 |
| 8353 | ACCUUAUG G CCUGUCUG | 2527 | CAGACAGG GGCTAGCTACAACGA CATAAGGT | 7324 |
| 8349 | UAUGGCCU G UCUGGCUU | 2528 | AAGCCAGA GGCTAGCTACAACGA AGGCCATA | 7325 |
| 8344 | CCUGUCUG G CUUCGGGG | 2529 | CCCCGAAG GGCTAGCTACAACGA CAGACAGG | 7326 |
| 8335 | CUUCGGGG G CCAAGUCA | 2530 | TGACTTGG GGCTAGCTACAACGA CCCCGAAG | 7327 |
| 8330 | GGGGCCAA G UCACAACA | 2531 | TGTTGTGA GGCTAGCTACAACGA TTGGCCCC | 7328 |
| 8327 | GCCAAGUC A CAACAUUG | 2532 | CAATGTTG GGCTAGCTACAACGA GACTTGGC | 7329 |
| 8324 | AAGUCACA A CAUUGGUA | 2533 | TACCAATG GGCTAGCTACAACGA TGTGACTT | 7330 |
| 8322 | GUCACAAC A UUGGUAAA | 2534 | TTTACCAA GGCTAGCTACAACGA GTTGTGAC | 7331 |
| 8318 | CAACAUUG G UAAAUUGA | 2535 | TCAATTTA GGCTAGCTACAACGA CAATGTTG | 7332 |
| 8314 | AUUGGUAA A UUGACUCC | 2536 | GGAGTCAA GGCTAGCTACAACGA TTACCAAT | 7333 |
| 8310 | GUAAAUUG A CUCCUCGA | 2537 | TCGAGGAG GGCTAGCTACAACGA CAATTTAC | 7334 |
| 8302 | ACUCCUCG A CACGGAUG | 2538 | CATCCGTG GGCTAGCTACAACGA CGAGGAGT | 7335 |
| 8300 | UCCUCGAC A CGGAUGUC | 2539 | GACATCCG GGCTAGCTACAACGA GTCGAGGA | 7336 |
| 8296 | CGACACGG A UGUCACUC | 2540 | GAGTGACA GGCTAGCTACAACGA CCGTGTCG | 7337 |
| 8294 | ACACGGAU G UCACUCUC | 2541 | GAGAGTGA GGCTAGCTACAACGA ATCCGTGT | 7338 |
| 8291 | CGGAUGUC A CUCUCGGU | 2542 | ACCGAGAG GGCTAGCTACAACGA GACATCCG | 7339 |
| 8284 | CACUCUCG G UGACUGUU | 2543 | AACAGTCA GGCTAGCTACAACGA CGAGAGTG | 7340 |
| 8281 | UCUCGGUG A CUGUUGAG | 2544 | CTCAACAG GGCTAGCTACAACGA CACCGAGA | 7341 |
| 8278 | CGGUGACU G UUGAGUCG | 2545 | CGACTCAA GGCTAGCTACAACGA AGTCACCG | 7342 |
| 8273 | ACUGUUGA G UCGAAACA | 2546 | TGTTTCGA GGCTAGCTACAACGA TCAACAGT | 7343 |
| 8267 | GAGUCGAA A CAGCGGGU | 2547 | ACCCGCTG GGCTAGCTACAACGA TTCGACTC | 7344 |
| 8264 | UCGAAACA G CGGGUGUC | 2548 | GACACCCG GGCTAGCTACAACGA TGTTTCGA | 7345 |
| 8260 | AACAGCGG G UGUCAUAU | 2549 | ATATGACA GGCTAGCTACAACGA CCGCTGTT | 7346 |
| 8258 | CAGCGGGU G UCAUAUGC | 2550 | GCATATGA GGCTAGCTACAACGA ACCCGCTG | 7347 |
| 8255 | CGGGUGUC A UAUGCAAA | 2551 | TTTGCATA GGCTAGCTACAACGA GACACCCG | 7348 |
| 8253 | GGUGUCAU A UGCAAAGC | 2552 | GCTTTGCA GGCTAGCTACAACGA ATGACACC | 7349 |
| 8251 | UGUCAUAU G CAAAGCCC | 2553 | GGGCTTTG GGCTAGCTACAACGA ATATGACA | 7350 |
| 8246 | UAUGCAAA G CCCAUAGG | 2554 | CCTATGGG GGCTAGCTACAACGA TTTGCATA | 7351 |
| 8242 | CAAAGCCC A UAGGGCAU | 2555 | ATGCCCTA GGCTAGCTACAACGA GGGCTTTG | 7352 |
| 8237 | CCCAUAGG G CAUUUCUU | 2556 | AAGAAATG GGCTAGCTACAACGA CCTATGGG | 7353 |
| 8235 | CAUAGGGC A UUUCUUUG | 2557 | CAAAGAAA GGCTAGCTACAACGA GCCCTATG | 7354 |
| 8226 | UUUCUUUG A UUUCCAGG | 2558 | CCTGGAAA GGCTAGCTACAACGA CAAAGAAA | 7355 |
| 8218 | AUUUCCAG G CAUUCACC | 2559 | GGTGAATG GGCTAGCTACAACGA CTGGAAAT | 7356 |
| 8216 | UUCCAGGC A UUCACCAG | 2560 | CTGGTGAA GGCTAGCTACAACGA GCCTGGAA | 7357 |
| 8212 | AGGCAUUC A CCAGGAAC | 2561 | GTTCCTGG GGCTAGCTACAACGA GAATGCCT | 7358 |
| 8205 | CACCAGGA A CUCAACCC | 2562 | GGGTTGAG GGCTAGCTACAACGA TCCTGGTG | 7359 |
| 8200 | GGAACUCA A CCCGCUGC | 2563 | GCAGCGGG GGCTAGCTACAACGA TGAGTTCC | 7360 |
| 8196 | CUCAACCC G CUGCCCAG | 2564 | CTGGGCAG GGCTAGCTACAACGA GGGTTGAG | 7361 |
| 8193 | AACCCGCU G CCCAGGAG | 2565 | CTCCTGGG GGCTAGCTACAACGA AGCGGGTT | 7362 |
| 8183 | CCAGGAGA G UACUGGAA | 2566 | TTCCAGTA GGCTAGCTACAACGA TCTCCTGG | 7363 |
| 8181 | AGGAGAGU A CUGGAAUC | 2567 | GATTCCAG GGCTAGCTACAACGA ACTCTCCT | 7364 |
| 8175 | GUACUGGA A UCCGUAUG | 2568 | CATACGGA GGCTAGCTACAACGA TCCAGTAC | 7365 |
| 8171 | UGGAAUCC G UAUGAAGA | 2569 | TCTTCATA GGCTAGCTACAACGA GGATTCCA | 7366 |
| 8169 | GAAUCCGU A UGAAGAGC | 2570 | GCTCTTCA GGCTAGCTACAACGA ACGGATTC | 7367 |
| 8162 | UAUGAAGA G CCCAUCAC | 2571 | GTGATGGG GGCTAGCTACAACGA TCTTCATA | 7368 |
| 8158 | AAGAGCCC A UCACGGCC | 2572 | GGCCGTGA GGCTAGCTACAACGA GGGCTCTT | 7369 |
| 8155 | AGCCCAUC A CGGCCUGA | 2573 | TCAGGCCG GGCTAGCTACAACGA GATGGGCT | 7370 |
| 8152 | CCAUCACG G CCUGAGGA | 2574 | TCCTCAGG GGCTAGCTACAACGA CGTGATGG | 7371 |
| 8140 | GAGGAAGG G UGGAGACC | 2575 | GGTCTCCA GGCTAGCTACAACGA CCTTCCTC | 7372 |
| 8134 | GGGUGGAG A CCACGUCG | 2576 | CGACGTGG GGCTAGCTACAACGA CTCCACCC | 7373 |
| 8131 | UGGAGACC A CGUCGUAA | 2577 | TTACGACG GGCTAGCTACAACGA GGTCTCCA | 7374 |
| 8129 | GAGACCAC G UCGUAAAG | 2578 | CTTTACGA GGCTAGCTACAACGA GTGGTCTC | 7375 |
| 8126 | ACCACGUC G UAAAGGGC | 2579 | GCCCTTTA GGCTAGCTACAACGA GACGTGGT | 7376 |
| 8119 | CGUAAAGG G CCAUUUUC | 2580 | CGTGTGTG GGCTAGCTACAACGA GAGAAAAT | 7377 |
| 8116 | AAAGGGCC A UUUUCUCG | 2581 | CGAGAAAA GGCTAGCTACAACGA GGCCCTTT | 7378 |
| 8108 | AUUUUCUC G CACACACG | 2582 | CGTGTGTG GGCTAGCTACAACGA GAGAAAAT | 7379 |
| 8106 | UUUCUCGC A CACACGAA | 2583 | TTCGTGTG GGCTAGCTACAACGA GCGAGAAA | 7380 |
| 8104 | UCUCGCAC A CACGAACC | 2584 | GGTTCGTG GGCTAGCTACAACGA GTGCGAGA | 7381 |
| 8102 | UCGCACAC A CGAACCCC | 2585 | GGGGTTCG GGCTAGCTACAACGA GTGTGCGA | 7382 |
| 8098 | ACACACGA A CCCCCAAG | 2586 | CTTGGGGG GGCTAGCTACAACGA TCGTGTGT | 7383 |
| 8090 | ACCCCCAA G UCUGGGAA | 2587 | TTCCCAGA GGCTAGCTACAACGA TTGGGGGT | 7384 |
| 8082 | GUCUGGGA A CACGAUAA | 2588 | TTATCGTG GGCTAGCTACAACGA TCCCAGAC | 7385 |
| 8080 | CUGGGAAC A CGAUAAGG | 2589 | CCTTATCG GGCTAGCTACAACGA GTTCCCAG | 7386 |
| 8077 | GGAACACG A UAAGGCGA | 2590 | TCGCCTTA GGCTAGCTACAACGA CGTGTTCC | 7387 |
| 8072 | ACGAUAAG G CGAGCUGG | 2591 | CCAGCTCG GGCTAGCTACAACGA CTTATCGT | 7388 |
| 8068 | UAAGGCGA G CUGGCUUG | 2592 | CAAGCCAG GGCTAGCTACAACGA TCGCCTTA | 7389 |
| 8064 | GCGAGCUG G CUUGCGGC | 2593 | GCCGCAAG GGCTAGCTACAACGA CAGCTCGC | 7390 |
| 8060 | GCUGGCUU G CGGCCUCC | 2594 | GGAGGCCG GGCTAGCTACAACGA AAGCCAGC | 7391 |
| 8057 | GGCUUGCG G CCUCCUUU | 2595 | AAAGGAGG GGCTAGCTACAACGA CGCAAGCC | 7392 |
| 8043 | UUUCUCUG G UUGGACGC | 2596 | GCGTCCAA GGCTAGCTACAACGA CAGAGAAA | 7393 |
| 8038 | CUGGUUGG A CGCAGAAA | 2597 | TTTCTGCG GGCTAGCTACAACGA CCAACCAG | 7394 |
| 8036 | GGUUGGAC G CAGAAAAC | 2598 | GTTTTCTG GGCTAGCTACAACGA GTCCAACC | 7395 |
| 8029 | CGCAGAAA A CCUCAUUU | 2599 | AAATGAGG GGCTAGCTACAACGA TTTCTGCG | 7396 |
| 8024 | AAAACCUC A UUUUUUGC | 2600 | GCAAAAAA GGCTAGCTACAACGA GAGGTTTT | 7397 |
| 8017 | CAUUUUUU G CCAUGAUG | 2601 | CATCATGG GGCTAGCTACAACGA AAAAAATG | 7398 |
| 8014 | UUUUUGCC A UGAUGGUG | 2602 | CACCATCA GGCTAGCTACAACGA GGCAAAAA | 7399 |
| 8011 | UUGCCAUG A UGGUGGUA | 2603 | TACCACCA GGCTAGCTACAACGA CATGGCAA | 7400 |
| 8008 | CCAUGAUG G UGGUAUCA | 2604 | TGATACCA GGCTAGCTACAACGA CATCATGG | 7401 |
| 8005 | UGAUGGUG G UAUCAAUU | 2605 | AATTGATA GGCTAGCTACAACGA CACCATCA | 7402 |
| 8003 | AUGGUGGU A UCAAUUGG | 2606 | CCAATTGA GGCTAGCTACAACGA ACCACCAT | 7403 |
| 7999 | UGGUAUCA A UUGGUGUC | 2607 | GACACCAA GGCTAGCTACAACGA TGATACCA | 7404 |
| 7995 | AUCAAUUG G UGUCUCAG | 2608 | CTGAGACA GGCTAGCTACAACGA CAATTGAT | 7405 |
| 7993 | CAAUUGGU G UCUCAGUG | 2609 | CACTGAGA GGCTAGCTACAACGA ACCAATTG | 7406 |
| 7987 | GUGUCUCA G UGUCUUCC | 2610 | GGAAGACA GGCTAGCTACAACGA TGAGACAC | 7407 |
| 7985 | GUCUCAGU G UCUUCCAG | 2611 | CTGGAAGA GGCTAGCTACAACGA ACTGAGAC | 7408 |
| 7977 | GUCUUCCA G CAAGUCCU | 2612 | AGGACTTG GGCTAGCTACAACGA TGGAAGAC | 7409 |
| 7973 | UCCAGCAA G UCCUUCCA | 2613 | TGGAAGGA GGCTAGCTACAACGA TTGCTGGA | 7410 |
| 7965 | GUCCUUCC A CACGGAGC | 2614 | GCTCCGTG GGCTAGCTACAACGA GGAAGGAC | 7411 |
| 7963 | CCUUCCAC A CGGAGCGG | 2615 | CCGCTCCG GGCTAGCTACAACGA GTGGAAGG | 7412 |
| 7958 | CACACGGA G CGGAUGUG | 2616 | CACATCCG GGCTAGCTACAACGA TCCGTGTG | 7413 |
| 7954 | CGGAGCGG A UGUGGUUG | 2617 | CAACCACA GGCTAGCTACAACGA CCGCTCCG | 7414 |
| 7952 | GAGCGGAU G UGGUUGAC | 2618 | GTCAACCA GGCTAGCTACAACGA ATCCGCTC | 7415 |
| 7949 | CGGAUGUG G UUGACGGC | 2619 | GCCGTCAA GGCTAGCTACAACGA CACATCCG | 7416 |
| 7945 | UGUGGUUG A CGGCCCCG | 2620 | CGGGGCCG GGCTAGCTACAACGA CAACCACA | 7417 |
| 7942 | GGUUGACG G CCCCGCUG | 2621 | CAGCGGGG GGCTAGCTACAACGA CGTCAACC | 7418 |
| 7937 | ACGGCCCC G CUGGAUAG | 2622 | CTATCCAG GGCTAGCTACAACGA GGGGCCGT | 7419 |
| 7932 | CCCGCUGG A UAGGUUCC | 2623 | GGAACCTA GGCTAGCTACAACGA CCAGCGGG | 7420 |
| 7928 | CUGGAUAG G UUCCGGAC | 2624 | GTCCGGAA GGCTAGCTACAACGA CTATCCAG | 7421 |
| 7921 | GGUUCCGG A CGUCCUUU | 2625 | AAAGGACG GGCTAGCTACAACGA CCGGAACC | 7422 |
| 7919 | UUCCGGAC G UCCUUUGC | 2626 | GCAAAGGA GGCTAGCTACAACGA GTCCGGAA | 7423 |
| 7912 | CGUCCUUU G CCCCAUAA | 2627 | TTATGGGG GGCTAGCTACAACGA AAAGGACG | 7424 |
| 7907 | UUUGCCCC A UAACCAAA | 2628 | TTTGGTTA GGCTAGCTACAACGA GGGGCAAA | 7425 |
| 7904 | GCCCCAUA A CCAAAUUU | 2629 | AAATTTGG GGCTAGCTACAACGA TATGGGGC | 7426 |
| 7899 | AUAACCAA A UUUGGACC | 2630 | GGTCCAAA GGCTAGCTACAACGA TTGGTTAT | 7427 |
| 7893 | AAAUUUGG A CCUGGCCG | 2631 | CGGCCAGG GGCTAGCTACAACGA CCAAATTT | 7428 |
| 7888 | UGGACCUG G CCGAAUGU | 2632 | ACATTCGG GGCTAGCTACAACGA CAGGTCCA | 7429 |
| 7883 | CUGGCCGA A UGUGGGGG | 2633 | CCCCCACA GGCTAGCTACAACGA TCGGCCAG | 7430 |
| 7881 | GGCCGAAU G UGGGGGCG | 2634 | CGCCCCCA GGCTAGCTACAACGA ATTCGGCC | 7431 |
| 7875 | AUGUGGGG G CGUCAGUC | 2635 | GACTGACG GGCTAGCTACAACGA CCCCACAT | 7432 |
| 7873 | GUGGGGGC G UCAGUCUG | 2636 | CAGACTGA GGCTAGCTACAACGA GCCCCCAC | 7433 |
| 7869 | GGGCGUCA G UCUGCAGG | 2637 | CCTGCAGA GGCTAGCTACAACGA TGACGCCC | 7434 |
| 7865 | GUCAGUCU G CAGGCUUC | 2638 | GAAGCCTG GGCTAGCTACAACGA AGACTGAC | 7435 |
| 7861 | GUCUGCAG G CUUCCUCU | 2639 | AGAGGAAG GGCTAGCTACAACGA CTGCAGAC | 7436 |
| 7852 | CUUCCUCU A CGGAUAGA | 2640 | TCTATCCG GGCTAGCTACAACGA AGAGGAAG | 7437 |
| 7848 | CUCUACGG A UAGAAGUU | 2641 | AACTTCTA GGCTAGCTACAACGA CCGTAGAG | 7438 |
| 7842 | GGAUAGAA G UUUAGCCU | 2642 | AGGCTAAA GGCTAGCTACAACGA TTCTATCC | 7439 |
| 7837 | GAAGUUUA G CCUUAACU | 2643 | AGTTAAGG GGCTAGCTACAACGA TAAACTTC | 7440 |
| 7831 | UAGCCUUA A CUGUGGAC | 2644 | GTCCACAG GGCTAGCTACAACGA TAAGGCTA | 7441 |
| 7828 | CCUUAACU G UGGACGCC | 2645 | GGCGTCCA GGCTAGCTACAACGA AGTTAAGG | 7442 |
| 7824 | AACUGUGG A CGCCUUCG | 2646 | CGAAGGCG GGCTAGCTACAACGA CCACAGTT | 7443 |
| 7822 | CUGUGGAC G CCUUCGCC | 2647 | GGCGAAGG GGCTAGCTACAACGA GTCCACAG | 7444 |
| 7816 | ACGCCUUC G CCUUCAUC | 2648 | GATGAAGG GGCTAGCTACAACGA GAAGGCGT | 7445 |
| 7810 | UCGCCUUC A UCUCCUUG | 2649 | CAAGGAGA GGCTAGCTACAACGA GAAGGCGA | 7446 |
| 7800 | CUCCUUGA G CACGUCCC | 2650 | GGGACGTG GGCTAGCTACAACGA TCAAGGAG | 7447 |
| 7798 | CCUUGAGC A CGUCCCGG | 2651 | CCGGGACG GGCTAGCTACAACGA GCTCAAGG | 7448 |
| 7796 | UUGAGCAC G UCCCGGUA | 2652 | TACCGGGA GGCTAGCTACAACGA GTGCTCAA | 7449 |
| 7790 | ACGUCCCG G UAGUGGUC | 2653 | GACCACTA GGCTAGCTACAACGA CGGGACGT | 7450 |
| 7787 | UCCCGGUA G UGGUCGUC | 2654 | GACGACCA GGCTAGCTACAACGA TACCGGGA | 7451 |
| 7784 | CGGUAGUG G UCGUCCAG | 2655 | CTGGACGA GGCTAGCTACAACGA CACTACCG | 7452 |
| 7781 | UAGUGGUC G UCCAGGAC | 2656 | GTCCTGGA GGCTAGCTACAACGA GACCACTA | 7453 |
| 7774 | CGUCCAGG A CUUGCAGU | 2657 | ACTGCAAG GGCTAGCTACAACGA CCTGGACG | 7454 |
| 7770 | CAGGACUU G CAGUCUGU | 2658 | ACAGACTG GGCTAGCTACAACGA AAGTCCTG | 7455 |
| 7767 | GACUUGCA G UCUGUCAA | 2659 | TTGACAGA GGCTAGCTACAACGA TGCAAGTC | 7456 |
| 7763 | UGCAGUCU G UCAAAGGU | 2660 | ACCTTTGA GGCTAGCTACAACGA AGACTGCA | 7457 |
| 7756 | UGUCAAAG G UGACCUUC | 2661 | GAAGGTCA GGCTAGCTACAACGA CTTTGACA | 7458 |
| 7753 | CAAAGGUG A CCUUCUUC | 2662 | GAAGAAGG GGCTAGCTACAACGA CACCTTTG | 7459 |
| 7743 | CUUCUUCU G CCGCUGGC | 2663 | GCCAGCGG GGCTAGCTACAACGA AGAAGAAG | 7460 |
| 7740 | CUUCUGCC G CUGGCUUG | 2664 | CAAGCCAG GGCTAGCTACAACGA GGCAGAAG | 7461 |
| 7736 | UGCCGCUG G CUUGCGCU | 2665 | AGCGCAAG GGCTAGCTACAACGA CAGCGGCA | 7462 |
| 7732 | GCUGGCUU G CGCUGCGA | 2666 | TCGCAGCG GGCTAGCTACAACGA AAGCCAGC | 7463 |
| 7730 | UGGCUUGC G CUGCGAGA | 2667 | TCTCGCAG GGCTAGCTACAACGA GCAAGCCA | 7464 |
| 7727 | CUUGCGCU G CGAGAUGU | 2668 | ACATCTCG GGCTAGCTACAACGA AGCGCAAG | 7465 |
| 7722 | GCUGCGAG A UGUUGUAG | 2669 | CTACAACA GGCTAGCTACAACGA CTCGCAGC | 7466 |
| 7720 | UGCGAGAU G UUGUAGCG | 2670 | CGCTACAA GGCTAGCTACAACGA ATCTCGCA | 7467 |
| 7717 | GAGAUGUU G UAGCGUAG | 2671 | CTACGCTA GGCTAGCTACAACGA AACATCTC | 7468 |
| 7714 | AUGUUGUA G CGUAGACC | 2672 | GGTCTACG GGCTAGCTACAACGA TACAACAT | 7469 |
| 7712 | GUUGUAGC G UAGACCAU | 2673 | ATGGTCTA GGCTAGCTACAACGA GCTACAAC | 7470 |
| 7708 | UAGCGUAG A CCAUGUUG | 2674 | CAACATGG GGCTAGCTACAACGA CTACGCTA | 7471 |
| 7705 | CGAUGACC A UGUUGUGG | 2675 | CCACAACA GGCTAGCTACAACGA GGTCTACG | 7472 |
| 7703 | UAGACCAU G UUGUGGUG | 2676 | CACCACAA GGCTAGCTACAACGA ATGGTCTA | 7473 |
| 7700 | ACCAUGUU G UGGUGACG | 2677 | CGTCACCA GGCTAGCTACAACGA AACATGGT | 7474 |
| 7697 | AUGUUGUG G UGACGCAG | 2678 | CTGCGTCA GGCTAGCTACAACGA CACAACAT | 7475 |
| 7694 | GUUGCUCA A CGCGUUGA | 2679 | TTGCTGCG GGCTAGCTACAACGA CACCACAA | 7476 |
| 7692 | GUGGUGAC G CAGCAAAG | 2680 | CTTTGCTG GGCTAGCTACAACGA GTCACCAC | 7477 |
| 7689 | GUGACGCA G CAAAGAGU | 2681 | ACTCTTTG GGCTAGCTACAACGA TGCGTCAC | 7478 |
| 7682 | AGCAAAGA G UUGCUCAA | 2682 | TTGAGCAA GGCTAGCTACAACGA TCTTTGCT | 7479 |
| 7679 | AAAGAGUU G CUCAACGC | 2683 | GCGTTGAG GGCTAGCTACAACGA AACTCTTT | 7480 |
| 7674 | GUUGCUCA A CGCGUUGA | 2684 | TCAACGCG GGCTAGCTACAACGA TGAGCAAC | 7481 |
| 7672 | UGCUCAAC G CGUUGAUG | 2685 | CATCAACG GGCTAGCTACAACGA GTTGAGCA | 7482 |
| 7670 | CUCAACGC G UUGAUGGG | 2686 | CCCATCAA GGCTAGCTACAACGA GCGTTGAG | 7483 |
| 7666 | ACGCGUUG A UGGGCAAC | 2687 | GTTGCCCA GGCTAGCTACAACGA CAACGCGT | 7484 |
| 7662 | GUUGAUGG G CAACUUGC | 2688 | GCAAGTTG GGCTAGCTACAACGA CCATCAAC | 7485 |
| 7659 | GAUGGGCA A CUUGCUUU | 2689 | AAAGCAAG GGCTAGCTACAACGA TGCCCATC | 7486 |
| 7655 | GGCAACUU G CUUUCCUC | 2690 | GAGGAAAG GGCTAGCTACAACGA AAGTTGCC | 7487 |
| 7645 | UUUCCUCC G CAGCGCAU | 2691 | ATGCGCTG GGCTAGCTACAACGA GGAGGAAA | 7488 |
| 7642 | CCUCCGCA G CGCAUGGC | 2692 | GCCATGCG GGCTAGCTACAACGA TGCGGAGG | 7489 |
| 7640 | UCCGCAGC G CAUGGCGU | 2693 | ACGCCATG GGCTAGCTACAACGA GCTGCGGA | 7490 |
| 7638 | CGCAGCGC A UGGCGUGA | 2694 | TCACGCCA GGCTAGCTACAACGA GCGCTGCG | 7491 |
| 7635 | AGCGCAUG G CGUGAUCA | 2695 | TGATCACG GGCTAGCTACAACGA CATGCGCT | 7492 |
| 7633 | CGCAUGGC G UGAUCAGG | 2696 | CCTGATCA GGCTAGCTACAACGA GCCATGCG | 7493 |
| 7630 | AUGGCGUG A UCAGGGCG | 2697 | CGCCCTGA GGCTAGCTACAACGA CACGCCAT | 7494 |
| 7624 | UGAUCAGG G CGCCCGUC | 2698 | GACGGGCG GGCTAGCTACAACGA CCTGATCA | 7495 |
| 7622 | AUCAGGGC G CCCGUCCA | 2699 | TGGACGGG GGCTAGCTACAACGA GCCCTGAT | 7496 |
| 7618 | GGGCGCCC G UCCAUGUG | 2700 | CACATGGA GGCTAGCTACAACGA GGGCGCCC | 7497 |
| 7614 | GCCCGUCC A UGUGUAGG | 2701 | CCTACACA GGCTAGCTACAACGA GGACGGGC | 7498 |
| 7612 | CCGUCCAU G UGUAGGAC | 2702 | GTCCTACA GGCTAGCTACAACGA ATGGACGG | 7499 |
| 7610 | GUCCAUGU G UAGGACAU | 2703 | ATGTCCTA GGCTAGCTACAACGA ACATGGAC | 7500 |
| 7605 | UGUGUAGG A CAUCGAGC | 2704 | GCTCGATG GGCTAGCTACAACGA CCTACACA | 7501 |
| 7603 | UGUAGGAC A UCGAGCAG | 2705 | CTGCTCGA GGCTAGCTACAACGA GTCCTACA | 7502 |
| 7598 | GACAUCGA G CAGCAGAC | 2706 | GTCTGCTG GGCTAGCTACAACGA TCGATGTC | 7503 |
| 7595 | AUCGAGCA G CAGACGAC | 2707 | GTCGTCTG GGCTAGCTACAACGA TGCTCGAT | 7504 |
| 7591 | AGCAGCAG A CGACAUCC | 2708 | GGATGTCG GGCTAGCTACAACGA CTGCTGCT | 7505 |
| 7588 | AGCAGACG A CAUCCUCG | 2709 | CGAGGATG GGCTAGCTACAACGA CGTCTGCT | 7506 |
| 7586 | CAGACGAC A UCCUCGCC | 2710 | GGCGAGGA GGCTAGCTACAACGA GTCGTCTG | 7507 |
| 7580 | ACAUCCUC G CCAGCCUC | 2711 | GAGGCTGG GGCTAGCTACAACGA GAGGATGT | 7508 |
| 7576 | CCUCGCCA G CCUCUUCG | 2712 | CGAAGAGG GGCTAGCTACAACGA TGGCGAGG | 7509 |
| 7568 | GCCUCUUC G CUCACGGU | 2713 | ACCGTGAG GGCTAGCTACAACGA GAAGAGGC | 7510 |
| 7564 | CUUCGCUC A CGGUAGAC | 2714 | GTCTACCG GGCTAGCTACAACGA GAGCGAAG | 7511 |
| 7561 | CGCUCACG G UAGACCAA | 2715 | TTGGTCTA GGCTAGCTACAACGA CGTGAGCG | 7512 |
| 7557 | CACGGUAG A CCAAGACC | 2716 | GGTCTTGG GGCTAGCTACAACGA CTACCGTG | 7513 |
| 7551 | AGACCAAG A CCCGUCGC | 2717 | GCGACGGG GGCTAGCTACAACGA CTTGGTCT | 7514 |
| 7547 | GACCCGUC G CUGAGAUC | 2718 | CTCAGCGA GGCTAGCTACAACGA GGGTCTTG | 7515 |
| 7544 | GACCCGUC G CUGAGAUC | 2719 | GATCTCAG GGCTAGCTACAACGA GACGGGTC | 7516 |
| 7538 | UCGCUGAG A UCGGGAUC | 2720 | GATCCCGA GGCTAGCTACAACGA CTCAGCGA | 7517 |
| 7532 | AGAUCGGG A UCCCCCGG | 2721 | CCGGGGGA GGCTAGCTACAACGA CCCGATCT | 7518 |
| 7524 | AUCCCCCG G CUCCCCCU | 2722 | AGGGGGAG GGCTAGCTACAACGA CGGGGGAT | 7519 |
| 7506 | AAGGGGGG G CAUAGAGG | 2723 | CCTCTATG GGCTAGCTACAACGA CCCCCCTT | 7520 |
| 7504 | GGGGGGGC A UAGAGGAG | 2724 | CTCCTCTA GGCTAGCTACAACGA GCCCCCCC | 7521 |
| 7496 | AUAGAGGA G UACGACUC | 2725 | GAGTCGTA GGCTAGCTACAACGA TCCTCTAT | 7522 |
| 7494 | AGAGGAGU A CGACUCAA | 2726 | TTGAGTCG GGCTAGCTACAACGA ACTCCTCT | 7523 |
| 7491 | GGAGUACG A CUCAACGU | 2727 | ACGTTGAG GGCTAGCTACAACGA CGTACTCC | 7524 |
| 7486 | ACGACUCA A CGUCGGAU | 2728 | ATCCGACG GGCTAGCTACAACGA TGAGTCGT | 7525 |
| 7484 | GACUCAAC G UCGGAUCC | 2729 | GGATCCGA GGCTAGCTACAACGA GTTGAGTC | 7526 |
| 7479 | AACGUCGG A UCCUGCGU | 2730 | ACGCAGGA GGCTAGCTACAACGA CCGACGTT | 7527 |
| 7474 | CGGAUCCU G CGUCACCG | 2731 | CGGTGACG GGCTAGCTACAACGA AGGATCCG | 7528 |
| 7472 | GAUCCUGC G UCACCGUC | 2732 | GACGGTGA GGCTAGCTACAACGA GCAGGATC | 7529 |
| 7469 | CCUGCGUC A CCGUCAUU | 2733 | AATGACGG GGCTAGCTACAACGA GACGCAGG | 7530 |
| 7466 | GCGUCACC G UCAUUGGA | 2734 | TCCAATGA GGCTAGCTACAACGA GGTGACGC | 7531 |
| 7463 | UCACCGUC A UUGGAGGU | 2735 | ACCTCCAA GGCTAGCTACAACGA GACGGTGA | 7532 |
| 7456 | CAUUGGAG G UCUGGUCG | 2736 | CGACCAGA GGCTAGCTACAACGA CTCCAATG | 7533 |
| 7451 | GAGGUCUG G UCGGGGGG | 2737 | CCCCCCCA GGCTAGCTACAACGA GGTGACGC | 7534 |
| 7441 | CGGGGGGG G CGGUUGCC | 2738 | GGCAACCG GGCTAGCTACAACGA CCCCCCCG | 7535 |
| 7438 | GGGGGGCG G UUGCCGUA | 2739 | TACGGCAA GGCTAGCTACAACGA CGCCCCCC | 7536 |
| 7435 | GGGCGGUU G CCGUACCU | 2740 | AGGTACGG GGCTAGCTACAACGA AACCGCCC | 7537 |
| 7432 | CGGUUGCC G UACCUCUA | 2741 | TAGAGGTA GGCTAGCTACAACGA GGCAACCG | 7538 |
| 7430 | GUUGCCGU A CCUCUAUC | 2742 | GATAGAGG GGCTAGCTACAACGA ACGGCAAC | 7539 |
| 7424 | GUACCUCU A UCAGCGGC | 2743 | GCCGCTGA GGCTAGCTACAACGA AGAGGTAC | 7540 |
| 7420 | CUCUAUCA G CGGCCGAU | 2744 | ATCGGCCG GGCTAGCTACAACGA TGATAGAG | 7541 |
| 7417 | UAUCAGCG G CCGAUGAU | 2745 | ATCATCGG GGCTAGCTACAACGA CGCTGATA | 7542 |
| 7413 | AGCGGCCG A UGAUUCAG | 2746 | CTGAATCA GGCTAGCTACAACGA CGGCCGCT | 7543 |
| 7410 | GGCCGAUG A UUCAGAGC | 2747 | GCTCTGAA GGCTAGCTACAACGA CATCGGCC | 7544 |
| 7403 | GAUUCAGA G CUGCCGAA | 2748 | TTCGGCAG GGCTAGCTACAACGA TCTGAATC | 7545 |
| 7400 | UCAGAGCU G CCGAAGGU | 2749 | ACCTTCGG GGCTAGCTACAACGA AGCTCTGA | 7546 |
| 7393 | UGCCGAAG G UCUUUGUG | 2750 | CACAAAGA GGCTAGCTACAACGA CTTCGGCA | 7547 |
| 7387 | AGGUCUUU G UGGCGAGC | 2751 | GCTCGCCA GGCTAGCTACAACGA AAAGACCT | 7548 |
| 7384 | UCUUUGUG G CGAGCUCC | 2752 | GGAGCTCG GGCTAGCTACAACGA CACAAAGA | 7549 |
| 7380 | UGUGGCGA G CUCCGCCA | 2753 | CCACCGTG GGCTAGCTACAACGA CTTCTGCC | 7550 |
| 7375 | CGAGCUCC G CCAAGGCA | 2754 | TGCCTTGG GGCTAGCTACAACGA GGAGCTCG | 7551 |
| 7369 | CCGCCAAG G CAGAAGAC | 2755 | GTCTTCTG GGCTAGCTACAACGA CTTGGCGG | 7552 |
| 7362 | GGCAGAAG A CACGGUGG | 2756 | CCACCGTG GGCTAGCTACAACGA CTTCTGCC | 7553 |
| 7360 | CAGAAGAC A CGGUGGAC | 2757 | GTCCACCG GGCTAGCTACAACGA GTCTTCTG | 7554 |
| 7357 | AAGACACG G UGGACUCU | 2758 | AGAGTCCA GGCTAGCTACAACGA CGTGTCTT | 7555 |
| 7353 | CACGGUGG A CUCUGUCA | 2759 | TGACAGAG GGCTAGCTACAACGA CCACCGTG | 7556 |
| 7348 | UGGACUCU G UCAGAACA | 2760 | TGTTCTGA GGCTAGCTACAACGA AGAGTCCA | 7557 |
| 7342 | CUGUCAGA A CAACCGUC | 2761 | GACGGTTG GGCTAGCTACAACGA TCTGACAG | 7558 |
| 7339 | UCAGAACA A CCGUCCUC | 2762 | GAGGACGG GGCTAGCTACAACGA TGTTCTGA | 7559 |
| 7336 | GAACAACC G UCCUCUUC | 2763 | GAAGAGGA GGCTAGCTACAACGA GGTTGTTC | 7560 |
| 7323 | CUUCCUCC G UGGAGGUG | 2764 | CACCTCCA GGCTAGCTACAACGA GGAGGAGG | 7561 |
| 7317 | CCGUGGAG G UGGUAUUG | 2765 | CAATACCA GGCTAGCTACAACGA CTCCACGG | 7562 |
| 7314 | UGGAGGUG G UAUUGGAG | 2766 | CTCCAATA GGCTAGCTACAACGA CACCTCCA | 7563 |
| 7312 | GAGGUGGU A UUGGAGGG | 2767 | CCCTCCAA GGCTAGCTACAACGA ACCACCTC | 7564 |
| 7303 | UUGGAGGG G CCUUGGCA | 2768 | TGCCAAGG GGCTAGCTACAACGA CCCTCCAA | 7565 |
| 7297 | GGGCCUUG G CAGGUGGC | 2769 | GCCACCTG GGCTAGCTACAACGA CAAGGCCC | 7566 |
| 7293 | CUUGGCAG G UGGCAAUG | 2770 | CATTGCCA GGCTAGCTACAACGA CTGCCAAG | 7567 |
| 7290 | GGCAGGUG G CAAUGGGC | 2771 | GCCCATTG GGCTAGCTACAACGA CACCTGCC | 7568 |
| 7287 | AGGUGGCA A UGGGCACC | 2772 | GGTGCCCA GGCTAGCTACAACGA TGCCACCT | 7569 |
| 7283 | GGCAAUGG G CACCCGUG | 2773 | CACGGGTG GGCTAGCTACAACGA CCATTGCC | 7570 |
| 7281 | CAAUGGGC A CCCGUGUA | 2774 | TACACGGG GGCTAGCTACAACGA GCCCATTG | 7571 |
| 7277 | GGGCACCC G UGUACCAC | 2775 | GTGGTACA GGCTAGCTACAACGA GGGTGCCC | 7572 |
| 7275 | GCACCCGU G UACCACCG | 2776 | CGGTGGTA GGCTAGCTACAACGA ACGGGTGC | 7573 |
| 7273 | ACCCGUGU A CCACCGGA | 2777 | TCCGGTGG GGCTAGCTACAACGA ACACGGGT | 7574 |
| 7270 | CGUGUACC A CCGGAGGG | 2778 | CCCTCCGG GGCTAGCTACAACGA GGTACACG | 7575 |
| 7261 | CCGGAGGG A CGUAGUCU | 2779 | AGACTACG GGCTAGCTACAACGA CCCTCCGG | 7576 |
| 7259 | GGAGGGAC G UAGUCUGG | 2780 | CCAGACTA GGCTAGCTACAACGA GTCCCTCC | 7577 |
| 7256 | GGGACGUA G UCUGGGUC | 2781 | GACCCAGA GGCTAGCTACAACGA TACGTCCC | 7578 |
| 7250 | UAGUCUGG G UCUUUCCA | 2782 | TGGAAAGA GGCTAGCTACAACGA CCAGACTA | 7579 |
| 7239 | UUUCCAGG G CUCUAGUA | 2783 | TACTAGAG GGCTAGCTACAACGA CCTGGAAA | 7580 |
| 7233 | GGGCUCUA G UAGUGGAG | 2784 | CTCCACTA GGCTAGCTACAACGA TAGAGCCC | 7581 |
| 7230 | CUCUAGUA G UGGAGGGU | 2785 | ACCCTCCA GGCTAGCTACAACGA TACTAGAG | 7582 |
| 7223 | AGUGGAGG G UUGUAAUC | 2786 | GATTACAA GGCTAGCTACAACGA CCTCCACT | 7583 |
| 7220 | GGAGGGUU G UAAUCCGG | 2787 | CCGGATTA GGCTAGCTACAACGA AACCCTCC | 7584 |
| 7217 | GGGUUGUA A UCCGGGCG | 2788 | CGCCCGGA GGCTAGCTACAACGA TACAACCC | 7585 |
| 7211 | UAAUCCGG G CGUGCCCA | 2789 | TGGGCACG GGCTAGCTACAACGA CCGGATTA | 7586 |
| 7209 | AUCCGGGC G UGCCCAUA | 2790 | TATGGGCA GGCTAGCTACAACGA GCCCGGAT | 7587 |
| 7207 | CCGGGCGU G CCCAUAUG | 2791 | CATATGGG GGCTAGCTACAACGA ACGCCCGG | 7588 |
| 7203 | GCGUGCCC A UAUGGGUA | 2792 | TACCCATA GGCTAGCTACAACGA GGGCACGC | 7589 |
| 7201 | GUGCCCAU A UGGGUAAC | 2793 | GTTACCCA GGCTAGCTACAACGA ATGGGCAC | 7590 |
| 7197 | CCAUAUGG G UAACGCUG | 2794 | CAGCGTTA GGCTAGCTACAACGA CCATATGG | 7591 |
| 7194 | UAUGGGUA A CGCUGAAG | 2795 | CTTCAGCG GGCTAGCTACAACGA TACCCATA | 7592 |
| 7192 | UGGGUAAC G CUGAAGGA | 2796 | TCCTTCAG GGCTAGCTACAACGA GTTACCCA | 7593 |
| 7182 | UGAAGGAA A CUUCUUGG | 2797 | CCAAGAAG GGCTAGCTACAACGA TTCCTTCA | 7594 |
| 7173 | CUUCUUGG A UUUCCGCA | 2798 | TGCGGAAA GGCTAGCTACAACGA CCAAGAAG | 7595 |
| 7167 | GGAUUUCC G CAGGAUCU | 2799 | AGATCCTG GGCTAGCTACAACGA GGAAATCC | 7596 |
| 7162 | UCCGCAGG A UCUCCGCC | 2800 | GGCGGAGA GGCTAGCTACAACGA CCTGCGGA | 7597 |
| 7156 | GGAUCUCC G CCGGAAUG | 2801 | CATTCCGG GGCTAGCTACAACGA GGAGATCC | 7598 |
| 7150 | CCGCCGGA A UGGACACC | 2802 | GGTGTCCA GGCTAGCTACAACGA TCCGGCGG | 7599 |
| 7146 | CGGAAUGG A CACCUCUC | 2803 | GAGAGGTG GGCTAGCTACAACGA CCATTCCG | 7600 |
| 7144 | GAAUGGAC A CCUCUCUC | 2804 | GAGAGAGG GGCTAGCTACAACGA GTCCATTC | 7601 |
| 7133 | UCUCUCUC A UCCUCCUC | 2805 | GAGGAGGA GGCTAGCTACAACGA GAGAGAGA | 7602 |
| 7123 | CCUCCUCC G CUCGAAGC | 2806 | GCTTCGAG GGCTAGCTACAACGA GGAGGAGG | 7603 |
| 7116 | CGCUCGAA G CGGGUCAA | 2807 | TTGACCCG GGCTAGCTACAACGA TTCGAGCG | 7604 |
| 7112 | CGAAGCGG G UCAAAAGA | 2808 | TCTTTTGA GGCTAGCTACAACGA CCGCTTCG | 7605 |
| 7103 | UCAAAAGA G UCCAGGGU | 2809 | ACCCTGGA GGCTAGCTACAACGA TCTTTTGA | 7606 |
| 7096 | AGUCCAGG G UAACUACC | 2810 | GGTAGTTA GGCTAGCTACAACGA CCTGGACT | 7607 |
| 7093 | CCAGGGUA A CUACCUUA | 2811 | TAAGGTAG GGCTAGCTACAACGA TACCCTGG | 7608 |
| 7090 | GGGUAACU A CCUUAUUC | 2812 | GAATAAGG GGCTAGCTACAACGA AGTTACCC | 7609 |
| 7085 | ACUACCUU A UUCUCUGA | 2813 | TCAGAGAA GGCTAGCTACAACGA AAGGTAGT | 7610 |
| 7077 | AUUCUCUG A CUCCACGC | 2814 | GCGTGGAG GGCTAGCTACAACGA CAGAGAAT | 7611 |
| 7072 | CUGACUCC A CGCGAGUG | 2815 | CACTCGCG GGCTAGCTACAACGA GGAGTCAG | 7612 |
| 7070 | GACUCCAC G CGAGUGAU | 2816 | ATCACTCG GGCTAGCTACAACGA GTGGAGTC | 7613 |
| 7066 | CCACGCGA G UGAUGUUA | 2817 | TAACATCA GGCTAGCTACAACGA TCGCGTGG | 7614 |
| 7063 | CGCGAGUG A UGUUACCG | 2818 | CGGTAACA GGCTAGCTACAACGA CACTCGCG | 7615 |
| 7061 | CGAGUGAU G UUACCGCC | 2819 | GGCGGTAA GGCTAGCTACAACGA ATCACTCG | 7616 |
| 7058 | GUGAUGUU A CCGCCCAU | 2820 | ATGGGCGG GGCTAGCTACAACGA AACATCAC | 7617 |
| 7055 | AUGUUACC G CCCAUCUC | 2821 | GAGATGGG GGCTAGCTACAACGA GGTAACAT | 7618 |
| 7051 | UACCGCCC A UCUCCUGC | 2822 | GCAGGAGA GGCTAGCTACAACGA GGGCGGTA | 7619 |
| 7044 | CAUCUCCU G CCGCCACA | 2823 | TGTGGCGG GGCTAGCTACAACGA AGGAGATG | 7620 |
| 7041 | CUCCUGCC G CCACAGGA | 2824 | TCCTGTGG GGCTAGCTACAACGA GGCAGGAG | 7621 |
| 7038 | CUGCCGCC A CAGGAGGU | 2825 | ACCTCCTG GGCTAGCTACAACGA GGCGGCAG | 7622 |
| 7031 | CACAGGAG G UUGGCCUC | 2826 | GAGGCCAA GGCTAGCTACAACGA CTCCTGTG | 7623 |
| 7027 | GGAGGUUG G CCUCGAUG | 2827 | CATCGAGG GGCTAGCTACAACGA CAACCTCC | 7624 |
| 7021 | UGGCCUCG A UGAGGUCA | 2828 | TGACCTCA GGCTAGCTACAACGA CGAGGCCA | 7625 |
| 7016 | UCGAUGAG G UCAAAGUC | 2829 | GACTTTGA GGCTAGCTACAACGA CTCATCGA | 7626 |
| 7010 | AGGUCAAA G UCUGGGGA | 2830 | TCCCCAGA GGCTAGCTACAACGA TTTGACCT | 7627 |
| 7001 | UCUGGGGA G UCAUAUUG | 2831 | CAATATGA GGCTAGCTACAACGA TCCCCAGA | 7628 |
| 6998 | GGGGAGUC A UAUUGGGU | 2832 | ACCCAATA GGCTAGCTACAACGA GACTCCCC | 7629 |
| 6996 | GGAGUCAU A UUGGGUAA | 2833 | TTACCCAA GGCTAGCTACAACGA ATGACTCC | 7630 |
| 6991 | CAUAUUGG G UAAUGUAU | 2834 | ATACATTA GGCTAGCTACAACGA CCAATATG | 7631 |
| 6988 | GGGGAGUC A UAUUGGGU | 2835 | GACATACA GGCTAGCTACAACGA TACCCAAT | 7632 |
| 6986 | UGGGUAAU G UAUGUCGC | 2836 | GCGACATA GGCTAGCTACAACGA ATTACCCA | 7633 |
| 6984 | GGUAAUGU A UGUCGCCU | 2837 | AGGCGACA GGCTAGCTACAACGA ACATTACC | 7634 |
| 6982 | UAAUGUAU G UCGCCUUC | 2838 | GAAGGCGA GGCTAGCTACAACGA ATACATTA | 7635 |
| 6979 | UGUAUGUC G CCUUCGAA | 2839 | TTCGAAGG GGCTAGCTACAACGA CACATACA | 7836 |
| 6966 | CGAAGAAG G CGCAGACA | 2840 | TGTCTGCG GGCTAGCTACAACGA CTTCTTCG | 7637 |
| 6964 | AAGAAGGC G CAGACAGC | 2841 | GCTGTCTG GGCTAGCTACAACGA GCCTTCTT | 7638 |
| 6960 | AGGCGCAG A CAGCUGGC | 2842 | GCCAGCTG GGCTAGCTACAACGA CTGCGCCT | 7639 |
| 6957 | CGCAGACA G CUGGCUAG | 2843 | CTAGCCAG GGCTAGCTACAACGA TGTCTGCG | 7640 |
| 6953 | GACAGCUG G CUAGCUGA | 2844 | TCAGCTAG GGCTAGCTACAACGA CAGCTGTC | 7641 |
| 6949 | GCUGGCUA G CUGAGGAG | 2845 | CTCCTCAG GGCTAGCTACAACGA TAGCCAGC | 7642 |
| 6941 | GCUGAGGA G CUGGCCAA | 2846 | TTGGCCAG GGCTAGCTACAACGA TCCTCAGC | 7643 |
| 6937 | AGGAGCUG G CCAAGGAG | 2847 | CTCCTTGG GGCTAGCTACAACGA CAGCTCCT | 7644 |
| 6921 | GGGGGGAG A CCCCCUGG | 2848 | CCAGGGGG GGCTAGCTACAACGA CTCCCCCC | 7645 |
| 6913 | ACCCCCUG G CCAGCCUA | 2849 | TAGGCTGG GGCTAGCTACAACGA CAGGGGGT | 7646 |
| 6909 | CCUGGCCA G CCUACGCU | 2850 | AGCGTAGG GGCTAGCTACAACGA TGGCCAGG | 7647 |
| 6905 | GCCAGCCU A CGCUUAGC | 2851 | GCTAAGCG GGCTAGCTACAACGA AGGCTGGC | 7648 |
| 6903 | CAGCCUAC G CUUAGCCG | 2852 | CGGCTAAG GGCTAGCTACAACGA GTAGGCTG | 7649 |
| 6898 | UACGCUUA G CCGUCUCU | 2853 | AGAGACGG GGCTAGCTACAACGA TAAGCGTA | 7650 |
| 6895 | GCUUAGCC G UCUCUCCU | 2854 | AGGAGAGA GGCTAGCTACAACGA GGCTAAGC | 7651 |
| 6886 | UCUCUCCU G UAAUGUGG | 2855 | CCACATTA GGCTAGCTACAACGA AGGAGAGA | 7652 |
| 6883 | CUCCUGUA A UGUGGGAG | 2856 | CTCCCACA GGCTAGCTACAACGA TACAGGAG | 7653 |
| 6881 | CCUGUAAU G UGGGAGGG | 2857 | CCCTCCCA GGCTAGCTACAACGA ATTACAGG | 7654 |
| 6872 | UGGGAGGG G UCGGUGAG | 2858 | CTCACCGA GGCTAGCTACAACGA CCCTCCCA | 7655 |
| 6868 | AGGGGUCG G UGAGCAUG | 2859 | CATGCTCA GGCTAGCTACAACGA CGACCCCT | 7656 |
| 6864 | GUCGGUGA G CAUGGACG | 2860 | CGTCCATG GGCTAGCTACAACGA TCACCGAC | 7657 |
| 6862 | CGGUGAGC A UGGACGUG | 2861 | CACGTCCA GGCTAGCTACAACGA GCTCACCG | 7658 |
| 6858 | GAGCAUGG A CGUGAGCA | 2862 | TGCTCACG GGCTAGCTACAACGA CCATGCTC | 7659 |
| 6856 | GCAUGGAC G UGAGCACU | 2863 | AGTGCTCA GGCTAGCTACAACGA GTCCATGC | 7660 |
| 6852 | GGACGUGA G CACUGCUA | 2864 | TAGCAGTG GGCTAGCTACAACGA TCACGTCC | 7661 |
| 6850 | ACGUGAGC A CUGCUACA | 2865 | TGTAGCAG GGCTAGCTACAACGA GCTCACGT | 7662 |
| 6847 | UGAGCACU G CUACAUCC | 2866 | GGATGTAG GGCTAGCTACAACGA AGTGCTCA | 7663 |
| 6844 | GCACUGCU A CAUCCGGU | 2867 | ACCGGATG GGCTAGCTACAACGA AGCAGTGC | 7664 |
| 6842 | ACUGCUAC A UCCGGUUC | 2868 | GAACCGGA GGCTAGCTACAACGA GTAGCAGT | 7665 |
| 6837 | UACAUCCG G UUCGGGCU | 2869 | AGCCCGAA GGCTAGCTACAACGA CGGATGTA | 7666 |
| 6831 | CGGUUCGG G CUCGCAUG | 2870 | CATGCGAG GGCTAGCTACAACGA CCGAACCG | 7667 |
| 6827 | UCGGGCUC G CAUGGGAG | 2871 | CTCCCATG GGCTAGCTACAACGA GAGCCCGA | 7668 |
| 6825 | GGGCUCGC A UGGGAGCU | 2872 | AGCTCCCA GGCTAGCTACAACGA GCGAGCCC | 7669 |
| 6819 | GCAUGGGA G CUGUGACC | 2873 | GGTCACAG GGCTAGCTACAACGA TCCCATGC | 7670 |
| 6816 | UGGGAGCU G UGACCCAA | 2874 | TTGGGTCA GGCTAGCTACAACGA AGCTCCCA | 7671 |
| 6813 | GAGCUGUG A CCCAACCA | 2875 | TGGTTGGG GGCTAGCTACAACGA CACAGCTC | 7672 |
| 6808 | GUGACCCA A CCAGGUAU | 2876 | ATACCTGG GGCTAGCTACAACGA TGGGTCAC | 7673 |
| 6803 | CCAACCAG G UAUUGGUU | 2877 | AACCAATA GGCTAGCTACAACGA CTGGTTGG | 7674 |
| 6801 | AACCAGGU A UUGGUUGA | 2878 | TCAACCAA GGCTAGCTACAACGA ACCTGGTT | 7675 |
| 6797 | AGGUAUUG G UUGAGCCC | 2879 | GGGCTCAA GGCTAGCTACAACGA CAATACCT | 7676 |
| 6792 | UUGGUUGA G CCCGACCU | 2880 | AGGTCGGG GGCTAGCTACAACGA TCAACCAA | 7677 |
| 6787 | UGAGCCCG A CCUGGAAU | 2881 | ATTCCAGG GGCTAGCTACAACGA CGGGCTCA | 7678 |
| 6780 | GACCUGGA A UGUGACCU | 2882 | AGGTCACA GGCTAGCTACAACGA TCCAGGTC | 7679 |
| 6778 | CCUGGAAU G UGACCUCC | 2883 | GGAGGTCA GGCTAGCTACAACGA ATTCCAGG | 7680 |
| 6775 | GGAAUGUG A CCUCCUCC | 2884 | GGAGGAGG GGCTAGCTACAACGA CACATTCC | 7681 |
| 6765 | CUCCUCCC G UAGGAGAG | 2885 | CTCTCCTA GGCTAGCTACAACGA GGGAGGAG | 7682 |
| 6756 | UAGGAGAG G UCCACACG | 2886 | CGTGTGGA GGCTAGCTACAACGA CTCTCCTA | 7683 |
| 6752 | AGAGGUCC A CACGCCGG | 2887 | CCGGCGTG GGCTAGCTACAACGA GGACCTCT | 7684 |
| 6750 | AGGUCCAC A CGCCGGAG | 2888 | CTCCGGCG GGCTAGCTACAACGA GTGGACCT | 7685 |
| 6748 | GUCCACAC G CCGGAGCG | 2889 | CGCTCCGG GGCTAGCTACAACGA GTGTGGAC | 7686 |
| 6742 | ACGCCGGA G CGUUUCUG | 2890 | CAGAAACG GGCTAGCTACAACGA TCCGGCGT | 7687 |
| 6740 | GCCGGAGC G UUUCUGUG | 2891 | CACAGAAA GGCTAGCTACAACGA GCTCCGGC | 7688 |
| 6734 | CGCUUUCU G UGCAGGCG | 2892 | CGCCTGCA GGCTAGCTACAACGA AGAAACGC | 7689 |
| 6732 | GUUUCUGU G CAGGCGUA | 2893 | TACGCCTG GGCTAGCTACAACGA ACAGAAAC | 7690 |
| 6728 | CUGUGCAG G CGUACCCC | 2894 | GGGGTACG GGCTAGCTACAACGA CTGCACAG | 7691 |
| 6726 | GUGCAGGC G UACCCCAU | 2895 | ATGGGGTA GGCTAGCTACAACGA GCCTGCAC | 7692 |
| 6724 | GCAGGCGU A CCCCAUCC | 2896 | GGATGGGG GGCTAGCTACAACGA ACGCCTGC | 7693 |
| 6719 | CGUACCCC A UCCACUUC | 2897 | GAAGTGGA GGCTAGCTACAACGA GGGGTACG | 7694 |
| 6715 | CCCCAUCC A CUUCCGUG | 2898 | CACGGAAG GGCTAGCTACAACGA GGATGGGG | 7695 |
| 6709 | CCACUUCC G UGAAGAAU | 2899 | ATTCTTCA GGCTAGCTACAACGA GGAAGTGG | 7696 |
| 6702 | CGUGAAGA A UUCGGGGG | 2900 | CCCCCGAA GGCTAGCTACAACGA CCCCCGAA | 7697 |
| 6693 | UUCGGGGG G CGGAACCU | 2901 | AGGTTCCG GGCTAGCTACAACGA CCCCCGAA | 7698 |
| 6688 | GGGGCGGA A CCUGGCAC | 2902 | GTGCCAGG GGCTAGCTACAACGA TCCGCCCC | 7699 |
| 6683 | GGAACCUG G CACGGGCA | 2903 | TGCCCGTG GGCTAGCTACAACGA CAGGTTCC | 7700 |
| 6681 | AACCUGGC A CGGGCAUU | 2904 | AATGCCCG GGCTAGCTACAACGA GCCAGGTT | 7701 |
| 6677 | UGGCACGG G CAUUUUAC | 2905 | GTAAAATG GGCTAGCTACAACGA CCGTGCCA | 7702 |
| 6675 | GCACGGGC A UUUUACGU | 2906 | ACGTAAAA GGCTAGCTACAACGA GCCCGTGC | 7703 |
| 6670 | GGCAUUUU A CGUUGUCA | 2907 | TGACAACG GGCTAGCTACAACGA AAAATGCC | 7704 |
| 6668 | CAUUUUAC G UUGUCAGU | 2908 | ACTGACAA GGCTAGCTACAACGA GTAAAATG | 7705 |
| 6665 | UUUACGUU G UCAGUGGU | 2909 | ACCACTGA GGCTAGCTACAACGA AACGTAAA | 7706 |
| 6661 | CGUUGUCA G UGGUCAUG | 2910 | CATCACCA GGCTAGCTACAACGA TGACAACG | 7707 |
| 6658 | UGUCAGUG G UCAUGCCC | 2911 | GGGCATGA GGCTAGCTACAACGA CACTGACA | 7708 |
| 6655 | CAGUGGUC A UGCCCGUC | 2912 | GACGGGCA GGCTAGCTACAACGA GACCACTG | 7709 |
| 6653 | GUGGUCAU G CCCGUCAC | 2913 | GTGACGGG GGCTAGCTACAACGA ATGACCAC | 7710 |
| 6649 | UCAUGCCC G UCACGUAG | 2914 | CTACGTGA GGCTAGCTACAACGA GGGCATGA | 7711 |
| 6646 | UGCCCGUC A CGUAGUGG | 2915 | CCACTACG GGCTAGCTACAACGA GACGGGCA | 7712 |
| 6644 | CCCGUCAC G UAGUGGAA | 2916 | TTCCACTA GGCTAGCTACAACGA GTGACGGG | 7713 |
| 6641 | GUCACGUA G UGGAAAUC | 2917 | GATTTCCA GGCTAGCTACAACGA TACGTGAC | 7714 |
| 6635 | UAGUGGAA A UCCCCCAC | 2918 | GTGGGGGA GGCTAGCTACAACGA TTCCACTA | 7715 |
| 6628 | AAUCCCCC A CCCGCGUA | 2919 | TACGCGGG GGCTAGCTACAACGA GGGGGATT | 7716 |
| 6624 | CCCCACCC G CGUAACCU | 2920 | AGGTTACG GGCTAGCTACAACGA GGGTGGGG | 7717 |
| 6622 | CCACCCGC G UAACCUCC | 2921 | GGAGGTTA GGCTAGCTACAACGA GCGGGTGG | 7718 |
| 6619 | CCCGCGUA A CCUCCACG | 2922 | CGTGGAGG GGCTAGCTACAACGA TACGCGGG | 7719 |
| 6613 | UAACCUCC A CGUACUCC | 2923 | GGAGTACG GGCTAGCTACAACGA GGAGGTTA | 7720 |
| 6611 | ACCUCCAC G UACUCCUC | 2924 | GAGGAGTA GGCTAGCTACAACGA GTGGAGGT | 7721 |
| 6609 | CUCCACGU A CUCCUCAG | 2925 | CTGAGGAG GGCTAGCTACAACGA ACGTGGAG | 7722 |
| 6601 | ACUCCUCA G CGGCCACC | 2926 | GGTGGCCG GGCTAGCTACAACGA TGAGGAGT | 7723 |
| 6598 | CCUCAGCG G CCACCCGC | 2927 | GCGGGTGG GGCTAGCTACAACGA CGCTGAGG | 7724 |
| 6595 | CAGCGGCC A CCCGCCAU | 2928 | ATGGCGGG GGCTAGCTACAACGA GGCCGCTG | 7725 |
| 6591 | GGCCACCC G CCAUAGCG | 2929 | CGCTATGG GGCTAGCTACAACGA GGGTGGCC | 7726 |
| 6588 | CACCCGCC A UAGCGCCC | 2930 | GGGCGCTA GGCTAGCTACAACGA GGCGGGTG | 7727 |
| 6585 | CCGCCAUA G CGCCCAUG | 2931 | CTAGGGCG GGCTAGCTACAACGA TATGGCGG | 7728 |
| 6583 | GCCAUAGC G CCCUAGAA | 2932 | TTCTAGGG GGCTAGCTACAACGA GCTATGGC | 7729 |
| 6575 | GCCCUAGA A UAGUUUGG | 2933 | CCAAACTA GGCTAGCTACAACGA TCTAGGGC | 7730 |
| 6572 | CUAGAAUA G UUUGGCGC | 2934 | GCGCCAAA GGCTAGCTACAACGA TATTCTAG | 7731 |
| 6567 | AUAGUUUG G CGCCGGGG | 2935 | CCCCGGCG GGCTAGCTACAACGA CAAACTAT | 7732 |
| 6565 | AGUUUGGC G CCGGGGAG | 2936 | CTCCCCGG GGCTAGCTACAACGA GCCAAACT | 7733 |
| 6555 | CGGGGAGG G UGUGCAGG | 2937 | CTCCCCGG GGCTAGCTACAACGA GCCAAACT | 7734 |
| 6553 | GGGAGGGU G UGCAGGGG | 2938 | CCCCTGCA GGCTAGCTACAACGA ACCCTCCC | 7735 |
| 6551 | GAGGGUGU G CAGGGGCC | 2939 | GGCCCCTG GGCTAGCTACAACGA ACACCCTC | 7736 |
| 6545 | GUGCAGGG G CCCGUGGU | 2940 | ACCACGGG GGCTAGCTACAACGA CCCTGCAC | 7737 |
| 6541 | AGGGGCCC G UGGUGUAU | 2941 | ATACACCA GGCTAGCTACAACGA GGGCCCCT | 7738 |
| 6538 | GGCCCGUG G UGUAUGCG | 2942 | CGCATACA GGCTAGCTACAACGA CACGGGCC | 7739 |
| 6536 | CCCGUGGU G UAUGCGUU | 2943 | AACGCATA GGCTAGCTACAACGA ACCACGGG | 7740 |
| 6534 | CGUGGUGU A UGCGUUGA | 2944 | TCAACGCA GGCTAGCTACAACGA ACACCACG | 7741 |
| 6532 | UGGUGUAU G CGUUGAUG | 2945 | CATCAACG GGCTAGCTACAACGA ATACACCA | 7742 |
| 6530 | GUGUAUGC G UUGAUGGG | 2946 | CCCATCAA GGCTAGCTACAACGA GCATACAC | 7743 |
| 6526 | AUGCGUUG A UGGGGAAU | 2947 | ATTCCCCA GGCTAGCTACAACGA CAACGCAT | 7744 |
| 6519 | GAUGGGGA A UGUUCCAU | 2948 | ATGGAACA GGCTAGCTACAACGA TCCCCATC | 7745 |
| 6517 | UGGGGAAU G UUCCAUGC | 2949 | GCATGGAA GGCTAGCTACAACGA ATTCCCCA | 7746 |
| 6512 | AAUGUUCC A UGCCACGU | 2950 | ACGTGGCA GGCTAGCTACAACGA GGAACATT | 7747 |
| 6510 | UGUUCCAU G CCACGUGU | 2951 | ACACGTGG GGCTAGCTACAACGA ATGGAACA | 7748 |
| 6507 | UCCAUGCC A CGUGUUGC | 2952 | GCAACACG GGCTAGCTACAACGA GGCATGGA | 7749 |
| 6505 | CAUGCCAC G UGUUGCUA | 2953 | TAGCAACA GGCTAGCTACAACGA GTGGCATG | 7750 |
| 6503 | UGCCACGU G UUGCUACA | 2954 | TGTAGCAA GGCTAGCTACAACGA ACGTGGCA | 7751 |
| 6500 | CACGUGUU G CUACAGGU | 2955 | ACCTGTAG GGCTAGCTACAACGA AACACGTG | 7752 |
| 6497 | GUGUUGCU A CAGGUCUU | 2956 | AAGACCTG GGCTAGCTACAACGA AGCAACAC | 7753 |
| 6493 | UGCUACAG G UCUUAGGC | 2957 | GCCTAAGA GGCTAGCTACAACGA CTGTAGCA | 7754 |
| 6486 | GGUCUUAG G CCCGACGA | 2958 | TCGTCGGG GGCTAGCTACAACGA CTAAGACC | 7755 |
| 6481 | UAGGCCCG A CGAUCCUC | 2959 | GAGGATCG GGCTAGCTACAACGA CGGGCCTA | 7756 |
| 6478 | GCCCGACG A UCCUCAUG | 2960 | CATGAGGA GGCTAGCTACAACGA CGTCGGGC | 7757 |
| 6472 | CGAUCCUC A UGGAACCG | 2961 | CGGTTCCA GGCTAGCTACAACGA GAGGATCG | 7758 |
| 6467 | CUCAUGGA A CCGUUCUU | 2962 | AAGAACGG GGCTAGCTACAACGA TCCATGAG | 7759 |
| 6464 | AUGGAACC G UUCUUGAC | 2963 | GTCAAGAA GGCTAGCTACAACGA GGTTCCAT | 7760 |
| 6457 | CGUUCUUG A CAUGUCCA | 2964 | TGGACATG GGCTAGCTACAACGA CAAGAACG | 7761 |
| 6455 | UUCUUGAC A UGUCCAGU | 2965 | ACTGGACA GGCTAGCTACAACGA GTCAAGAA | 7762 |
| 6453 | CUUGACAU G UCCAGUGA | 2966 | TCACTGGA GGCTAGCTACAACGA ATGTCAAG | 7763 |
| 6448 | CAUGUCCA G UGAUCUGC | 2967 | GCAGATCA GGCTAGCTACAACGA TGGACATG | 7764 |
| 6445 | GUCCAGUG A UCUGCGCU | 2968 | AGCGCAGA GGCTAGCTACAACGA CACTGGAC | 7765 |
| 6441 | AGUGAUCU G CGCUCCGC | 2969 | GCGGAGCG GGCTAGCTACAACGA AGATCACT | 7766 |
| 6439 | UGAUCUGC G CUCCGCAU | 2970 | ATGCGGAG GGCTAGCTACAACGA GCAGATCA | 7767 |
| 6434 | UGCGCUCC G CAUGGGCA | 2971 | TGCCCATG GGCTAGCTACAACGA GGAGCGCA | 7768 |
| 6432 | CGCUCCGC A UGGGCAGG | 2972 | CCTGCCCA GGCTAGCTACAACGA GCGGAGCG | 7769 |
| 6428 | CCGCAUGG G CAGGUGGU | 2973 | ACCACCTG GGCTAGCTACAACGA CCATGCGG | 7770 |
| 6424 | AUGGGCAG G UGGUUUGC | 2974 | GCAAACCA GGCTAGCTACAACGA CTGCCCAT | 7771 |
| 6421 | GGCAGGUG G UUUGCAUG | 2975 | CATGCAAA GGCTAGCTACAACGA CACCTGCC | 7772 |
| 6417 | GGUGGUUU G CAUGAUAC | 2976 | GTATCATG GGCTAGCTACAACGA AAACCAAC | 7773 |
| 6415 | UGGUUUGC A UGAUACCG | 2977 | CGGTATCA GGCTAGCTACAACGA GCAAACCA | 7774 |
| 6412 | UUUGCAUG A UACCGUCU | 2978 | AGACGGTA GGCTAGCTACAACGA CATGCAAA | 7775 |
| 6410 | UGCAUGAU A CCGUCUCC | 2979 | GGAGACGG GGCTAGCTACAACGA ATCATGCA | 7776 |
| 6407 | AUGAUACC G UCUCCCCG | 2980 | CGGGGAGA GGCTAGCTACAACGA GGTATCAT | 7777 |
| 6399 | GUCUCCCC G CCAGACCC | 2981 | GGGTCTGG GGCTAGCTACAACGA GGGGAGAC | 7778 |
| 6394 | CCCGCCAG A CCCCCCUG | 2982 | CAGGGGGG GGCTAGCTACAACGA CTGGCGGG | 7779 |
| 6386 | ACCCCCCU G UACCCACG | 2983 | CGTGGGTA GGCTAGCTACAACGA AGGGGGGT | 7780 |
| 6384 | CCCCCUGU A CCCACGUU | 2984 | AACGTGGG GGCTAGCTACAACGA ACAGGGGG | 7781 |
| 6380 | CUGUACCC A CGUUGGCA | 2985 | TGCCAACG GGCTAGCTACAACGA GGGTACAG | 7782 |
| 6378 | GUACCCAC G UUGGCAUG | 2986 | CATGCCAA GGCTAGCTACAACGA GTGGGTAC | 7783 |
| 6374 | CCACGUUG G CAUGAGAA | 2987 | TTCTCATG GGCTAGCTACAACGA CAACGTGG | 7784 |
| 6372 | ACGUUGGC A UGAGAAGA | 2988 | TCTTCTCA GGCTAGCTACAACGA GCCAACGT | 7785 |
| 6358 | AGAAAGGG A CUCCCGGC | 2989 | GCCGGGAG GGCTAGCTACAACGA CCCTTTCT | 7786 |
| 6351 | GACUCCCG G CAACCGCG | 2990 | CGCGGTTG GGCTAGCTACAACGA CGGGAGTC | 7787 |
| 6348 | UCCCGGCA A CCGCGGCA | 2991 | TGCCGCGG GGCTAGCTACAACGA TGCCGGGA | 7788 |
| 6345 | CGGCAACC G CGGCAGGA | 2992 | TCCTGCCG GGCTAGCTACAACGA GGTTGCCG | 7789 |
| 6342 | CAACCGCG G CAGGAGCU | 2993 | AGCTCCTG GGCTAGCTACAACGA CGCGGTTG | 7790 |
| 6336 | CGGCAGGA G CUUGGACU | 2994 | AGTCCAAG GGCTAGCTACAACGA TCCTGCCG | 7791 |
| 6330 | GAGCUUGG A CUGAAGCC | 2995 | GGCTTCAG GGCTAGCTACAACGA CCAAGCTC | 7792 |
| 6324 | GGACUGAA G CCAGGUCU | 2996 | AGACCTGG GGCTAGCTACAACGA TTCAGTCC | 7793 |
| 6319 | GAAGCCAG G UCUUGAAG | 2997 | CTTCAAGA GGCTAGCTACAACGA CTGGCTTC | 7794 |
| 6311 | GUCUUGAA G UCAGUCAA | 2998 | TTGACTGA GGCTAGCTACAACGA TTCAAGAC | 7795 |
| 6307 | UGAAGUCA G UCAACACC | 2999 | GGTGTTGA GGCTAGCTACAACGA TGACTTCA | 7796 |
| 6303 | GUCAGUCA A CACCGUGC | 3000 | GCACGGTG GGCTAGCTACAACGA TGACTGAC | 7797 |
| 6301 | CAGUCAAC A CCGUGCAU | 3001 | ATGCACGG GGCTAGCTACAACGA GTTGACTG | 7798 |
| 6298 | UCAACACC G UGCAUAUC | 3002 | GATATGCA GGCTAGCTACAACGA GGTGTTGA | 7799 |
| 6296 | AACACCGU G CAUAUCCA | 3003 | TGGATATG GGCTAGCTACAACGA ACGGTGTT | 7800 |
| 6294 | CACCGUGC A UAUCCAGU | 3004 | ACTGGATA GGCTAGCTACAACGA GCACGGTG | 7801 |
| 6292 | CCGUGCAU A UCCAGUCC | 3005 | GGACTGGA GGCTAGCTACAACGA ATGCACGG | 7802 |
| 6287 | CAUAUCCA G UCCCAAAC | 3006 | GTTTGGGA GGCTAGCTACAACGA TGGATATG | 7803 |
| 6280 | AGUCCCAA A CAUCCCUU | 3007 | AAGGGATG GGCTAGCTACAACGA TTGGGACT | 7804 |
| 6278 | UCCCAAAC A UCCCUUAG | 3008 | CTAAGGGA GGCTAGCTACAACGA GTTTGGGA | 7805 |
| 6270 | AUCCCUUA G CCACGAGC | 3009 | GCTCGTGG GGCTAGCTACAACGA TAAGGGAT | 7806 |
| 6267 | CCUUAGCC A CGAGCCGG | 3010 | CCGGCTCG GGCTAGCTACAACGA GGCTAAGG | 7807 |
| 6263 | AGCCACGA G CCGGAACA | 3011 | TGTTCCGG GGCTAGCTACAACGA TCGTGGCT | 7808 |
| 6257 | GAGCCGGA A CAUGGCGU | 3012 | ACGCCATG GGCTAGCTACAACGA TCCGGCTC | 7809 |
| 6255 | GCCGGAAC A UGGCGUGG | 3013 | CCACGCCA GGCTAGCTACAACGA GTTCCGGC | 7810 |
| 6252 | GGAACAUG G CGUGGAGC | 3014 | GCTCCAGG GGCTAGCTACAACGA CATGTTCC | 7811 |
| 6250 | AACAUGGC G UGGAGCAG | 3015 | CTGCTCCA GGCTAGCTACAACGA GCCATGTT | 7812 |
| 6245 | GGCGUGGA G CAGUCCUC | 3016 | GAGGACTG GGCTAGCTACAACGA TCCACGCC | 7813 |
| 6242 | GUGGAGCA G UCCUCAUU | 3017 | AATGAGGA GGCTAGCTACAACGA TGCTCCAC | 7814 |
| 6236 | CAGUCCUC A UUGAUCCA | 3018 | TGGATCAA GGCTAGCTACAACGA GAGGACTG | 7815 |
| 6232 | CCUCAUUG A UCCACUGA | 3019 | TCAGTGGA GGCTAGCTACAACGA CAATGAGG | 7816 |
| 6228 | AUUGAUCC A CUGAUGGA | 3020 | TCCATCAG GGCTAGCTACAACGA GGATCAAT | 7817 |
| 6224 | AUCCACUG A UGGAGCCU | 3021 | AGGCTCCA GGCTAGCTACAACGA CAGTGGAT | 7818 |
| 6219 | CUGAUGGA G CCUCCUCA | 3022 | TGAGGAGG GGCTAGCTACAACGA TCCATCAG | 7819 |
| 6210 | CCUCCUCA G CAGCUGAG | 3023 | CTCAGCTG GGCTAGCTACAACGA TGAGGAGG | 7820 |
| 6207 | CCUCAGCA G CUGAGUGA | 3024 | TCACTCAG GGCTAGCTACAACGA TGCTGAGG | 7821 |
| 6202 | GCAGCUGA G UGAUGGUG | 3025 | CACCATCA GGCTAGCTACAACGA TCAGCTGC | 7822 |
| 6199 | GCUGAGUG A UGGUGAGG | 3026 | CCTCACCA GGCTAGCTACAACGA CACTCAGC | 7823 |
| 6196 | GAGUGAUG G UGAGGCUG | 3027 | CAGCCTCA GGCTAGCTACAACGA CATCACTC | 7824 |
| 6191 | AUGGUGAG G CUGGAGAG | 3028 | CTCTCCAG GGCTAGCTACAACGA CTCACCAT | 7825 |
| 6181 | UGGAGAGG A UUUGUGUG | 3029 | CACACAAA GGCTAGCTACAACGA CCTCTCCA | 7826 |
| 6177 | GAGGAUUU G UGUGACGC | 3030 | GCGTCACA GGCTAGCTACAACGA AAATCCTC | 7827 |
| 6175 | GGAUUUGU G UGACGCGC | 3031 | GCGCGTCA GGCTAGCTACAACGA ACAAATCC | 7828 |
| 6172 | UUUGUGUG A CGCGCGCC | 3032 | GGCGCGCG GGCTAGCTACAACGA CACACAAA | 7829 |
| 6170 | UGUGUGAC G CGCGCCGC | 3033 | GCGGCGCG GGCTAGCTACAACGA GTCACACA | 7830 |
| 6168 | UGUGACGC G CGCCGCUG | 3034 | CAGCGGCG GGCTAGCTACAACGA GCGTCACA | 7831 |
| 6166 | UGACGCGC G CCGCUGCG | 3035 | CGCAGCGG GGCTAGCTACAACGA GCGCGTCA | 7832 |
| 6163 | CGCGCGCC G CUGCGUCG | 3036 | CGACGCAG GGCTAGCTACAACGA GGCGCGCG | 7833 |
| 6160 | GCGCCGCU G CGUCGCUC | 3037 | GAGCGACG GGCTAGCTACAACGA AGCGGCGC | 7834 |
| 6158 | GCCGCUGC G UCGCUCUC | 3038 | GAGAGCGA GGCTAGCTACAACGA GCAGCGGC | 7835 |
| 6155 | GCUGCGUC G CUCUCAGG | 3039 | CCTGAGAG GGCTAGCTACAACGA GACGCAGC | 7836 |
| 6147 | GCUCUCAG G CACAUAGU | 3040 | ACTATGTG GGCTAGCTACAACGA CTGAGAGC | 7837 |
| 6145 | UCUCAGGC A CAUAGUGC | 3041 | GCACTATG GGCTAGCTACAACGA GCCTGAGA | 7838 |
| 6143 | UCAGGCAC A UAGUGCGU | 3042 | ACGCACTA GGCTAGCTACAACGA GTGCCTGA | 7839 |
| 6140 | GGCACAUA G UGCGUGGG | 3043 | CCCACGCA GGCTAGCTACAACGA TATGTGCC | 7840 |
| 6138 | CACAUAGU G CGUGGGGG | 3044 | CCCCCACG GGCTAGCTACAACGA ACTATGTG | 7841 |
| 6136 | CAUAGUGC G UGGGGGAG | 3045 | CTCCCCCA GGCTAGCTACAACGA GCACTATG | 7842 |
| 6127 | UGGGGGAG A CAUGGUUG | 3046 | CAACCATG GGCTAGCTACAACGA CTCCCCCA | 7843 |
| 6125 | GGGGAGAC A UGGUUGCC | 3047 | GGCAACCA GGCTAGCTACAACGA GTCTCCCC | 7844 |
| 6122 | GAGACAUG G UUGCCCCG | 3048 | CGGGGCAA GGCTAGCTACAACGA CATGTCTC | 7845 |
| 6119 | ACAUGGUU G CCCCGCGA | 3049 | TCGCGGGG GGCTAGCTACAACGA AACCATGT | 7846 |
| 6114 | GUUGCCCC G CGAAGCGA | 3050 | TCGCTTCG GGCTAGCTACAACGA GGGGCAAC | 7847 |
| 6109 | CCCGCGAA G CGAACGCU | 3051 | AGCGTTCG GGCTAGCTACAACGA TTCGCGGG | 7848 |
| 6105 | CGAAGCGA A CGCUAUCA | 3052 | TGATAGCG GGCTAGCTACAACGA TCGCTTCG | 7849 |
| 6103 | AAGCGAAC G CUAUCAGC | 3053 | GCTGATAG GGCTAGCTACAACGA GTTCGCTT | 7850 |
| 6100 | CGAACGCU A UCAGCCGA | 3054 | TCGGCTGA GGCTAGCTACAACGA AGCGTTCG | 7851 |
| 6096 | CGCUAUCA G CCGAUUCA | 3055 | TGAATCGG GGCTAGCTACAACGA TGATAGCG | 7852 |
| 6092 | AUCAGCCG A UUCAUCCA | 3056 | TGGATGAA GGCTAGCTACAACGA CGGCTGAT | 7853 |
| 6088 | GCCGAUUC A UCCACUGC | 3057 | GCAGTGGA GGCTAGCTACAACGA GAATCGGC | 7854 |
| 6084 | AUUCAUCC A CUGCACAG | 3058 | CTGTGCAG GGCTAGCTACAACGA GGATGAAT | 7855 |
| 6081 | CAUCCACU G CACAGCGC | 3059 | GCGCTGTG GGCTAGCTACAACGA AGTGGATG | 7856 |
| 6079 | UCCACUGC A CAGCGCCC | 3060 | GGGCGCTG GGCTAGCTACAACGA GCAGTGGA | 7857 |
| 6076 | ACUGCACA G CGCCCUCU | 3061 | AGAGGGCG GGCTAGCTACAACGA TGTGCAGT | 7858 |
| 6074 | UGCACAGC G CCCUCUCC | 3062 | GGAGAGGG GGCTAGCTACAACGA GCTGTGCA | 7859 |
| 6062 | UCUCCUGG G CCCACAUG | 3063 | CATGTGGG GGCTAGCTACAACGA CCAGGAGA | 7860 |
| 6058 | CUGGGCCC A CAUGCCGA | 3064 | TCGGCATG GGCTAGCTACAACGA GGGCCCAG | 7861 |
| 6056 | GGGCCCAC A UGCCGACG | 3065 | CGTCGGCA GGCTAGCTACAACGA GTGGGCCC | 7862 |
| 6054 | GCCCACAU G CCGACGCA | 3066 | TGCGTCGG GGCTAGCTACAACGA ATGTGGGC | 7863 |
| 6050 | ACAUGCCG A CGCAGUAU | 3067 | ATACTGCG GGCTAGCTACAACGA CGGCATGT | 7864 |
| 6048 | AUGCCGAC G CAGUAUCG | 3068 | CGATACTG GGCTAGCTACAACGA GTCGGCAT | 7865 |
| 6045 | CCGACGCA G UAUCGCUG | 3069 | CAGCGATA GGCTAGCTACAACGA TGCGTCGG | 7866 |
| 6043 | GACGCAGU A UCGCUGCG | 3070 | CGCAGCGA GGCTAGCTACAACGA ACTGCGTC | 7867 |
| 6040 | GCAGUAUC G CUGCGCAC | 3071 | GTGCGCAG GGCTAGCTACAACGA GATACTGC | 7868 |
| 6037 | GUAUCGCU G CGCACACC | 3072 | GGTGTGCG GGCTAGCTACAACGA AGCGATAC | 7869 |
| 6035 | AUCGCUGC G CACACCAC | 3073 | GTGGTGTG GGCTAGCTACAACGA GCAGCGAT | 7870 |
| 6033 | CGCUGCGC A CACCACCC | 3074 | GGGTGGTG GGCTAGCTACAACGA GCGCAGCG | 7871 |
| 6031 | CUGCGCAC A CCACCCCG | 3075 | CGGGGTGG GGCTAGCTACAACGA GTGCGCAG | 7872 |
| 6028 | CGCACACC A CCCCGACG | 3076 | CGTCGGGG GGCTAGCTACAACGA GGTGTGCG | 7873 |
| 6022 | CCACCCCG A CGACCAGG | 3077 | CCTGGTCG GGCTAGCTACAACGA CGGGGTGG | 7874 |
| 6019 | CCCCGACG A CCAGGGCG | 3078 | CGCCCTGG GGCTAGCTACAACGA CGTCGGGG | 7875 |
| 6013 | CGACCAGG G CGCCAGGA | 3079 | TCCTGGCG GGCTAGCTACAACGA CCTGGTCG | 7876 |
| 6011 | ACCAGGGC G CCAGGAGA | 3080 | TCTCCTGG GGCTAGCTACAACGA GCCCTGGT | 7877 |
| 5998 | GAGAGAGG A UGGCAGGG | 3081 | CCCTGCCA GGCTAGCTACAACGA CCTCTCTC | 7878 |
| 5995 | AGAGGUAG G CAGGGAGU | 3082 | ACTCCCTG GGCTAGCTACAACGA CATCCTCT | 7879 |
| 5988 | GGCAGGGA G UAAGUUGA | 3083 | TCAACTTA GGCTAGCTACAACGA TCCCTGCC | 7880 |
| 5984 | GGGAGUAA G UUGACCAG | 3084 | CTGGTCAA GGCTAGCTACAACGA TTACTCCC | 7881 |
| 5980 | GUAAGUUG A CCAGGUCC | 3085 | GGACCTGG GGCTAGCTACAACGA CAACTTAC | 7882 |
| 5975 | UUGACCAG G UCCUCGGU | 3086 | ACCGAGGA GGCTAGCTACAACGA CTGGTCAA | 7883 |
| 5968 | GGUCCUCG G UAGAAGGC | 3087 | GCCTTCTA GGCTAGCTACAACGA CGAGGACC | 7884 |
| 5961 | GGUAGAAG G CAUCUCCC | 3088 | GGGAGATG GGCTAGCTACAACGA CTTCTACC | 7885 |
| 5959 | UAGAAGGC A UCUCCCCG | 3089 | CGGGGAGA GGCTAGCTACAACGA GCCTTCTA | 7886 |
| 5951 | AUCUCCCC G CUCAUGAC | 3090 | GTCATGAG GGCTAGCTACAACGA GGGGAGAT | 7887 |
| 5947 | CCCCGCUC A UGACCUUG | 3091 | CAAGGTCA GGCTAGCTACAACGA GAGCGGGG | 7888 |
| 5944 | CGCUCAUG A CCUUGAAG | 3092 | CTTCAAGG GGCTAGCTACAACGA CATGAGCG | 7889 |
| 5935 | CCUUGAAG G CCACGAGA | 3093 | TCTCGTGG GGCTAGCTACAACGA CTTCAAGG | 7890 |
| 5932 | UGAAGGCC A CGAGAGCA | 3094 | TGCTCTCG GGCTAGCTACAACGA GGCCTTCA | 7891 |
| 5926 | CCACGAGA G CACCCGCC | 3095 | GGCGGGTG GGCTAGCTACAACGA TCTCGTGG | 7892 |
| 5924 | ACGAGAGC A CCCGCCAC | 3096 | GTGGCGGG GGCTAGCTACAACGA GCTCTCGT | 7893 |
| 5920 | GAGCACCC G CCACUCCU | 3097 | AGGAGTGG GGCTAGCTACAACGA GGGTGCTC | 7894 |
| 5917 | CACCCGCC A CUCCUGCU | 3098 | AGCAGGAG GGCTAGCTACAACGA GGCGGGTG | 7895 |
| 5911 | CCACUCCU G CUCCAUAG | 3099 | CTATGGAG GGCTAGCTACAACGA AGGAGTGG | 7896 |
| 5906 | CCUGCUCC A UAGCCCGC | 3100 | GCGGGCTA GGCTAGCTACAACGA GGAGCAGG | 7897 |
| 5903 | GCUCCAUA G CCCGCCAG | 3101 | CTGGCGGG GGCTAGCTACAACGA TATGGAGC | 7898 |
| 5899 | CAUAGCCC G CCAGAAUG | 3102 | CATTCTGG GGCTAGCTACAACGA GGGCTATG | 7899 |
| 5893 | CCGCCAGA A UGUCUACA | 3103 | TGTAGACA GGCTAGCTACAACGA TCTGGCGG | 7900 |
| 5891 | GCCAGAAU G UCUACAAG | 3104 | CTTGTAGA GGCTAGCTACAACGA ATTCTGGC | 7901 |
| 5887 | GAAUGUCU A CAAGCACC | 3105 | GGTGCTTG GGCTAGCTACAACGA AGACATTC | 7902 |
| 5883 | GUCUACAA G CACCUUCC | 3106 | GGAAGGTG GGCTAGCTACAACGA TTGTAGAC | 7903 |
| 5881 | CUACAAGC A CCUUCCCA | 3107 | TGGGAAGG GGCTAGCTACAACGA GCTTGTAG | 7904 |
| 5870 | UUCCCAAG G CCUAUGCU | 3108 | AGCATAGG GGCTAGCTACAACGA CTTGGGAA | 7905 |
| 5866 | CAAGGCCU A UGCUGCCA | 3109 | TGGCAGCA GGCTAGCTACAACGA AGGCCTTG | 7906 |
| 5864 | AGGCCUAU G CUGCCAAC | 3110 | GTTGGCAG GGCTAGCTACAACGA ATAGGCCT | 7907 |
| 5861 | CCUAUGCU G CCAACAGC | 3111 | GCTGTTGG GGCTAGCTACAACGA AGCATAGG | 7908 |
| 5857 | UGCUGCCA A CAGCCGCG | 3112 | CGCGGCTG GGCTAGCTACAACGA TGGCAGCA | 7909 |
| 5854 | UGCCAACA G CCGCGCCA | 3113 | TGGCGCGG GGCTAGCTACAACGA TGTTGGCA | 7910 |
| 5851 | CAACAGCC G CGCCAGCG | 3114 | CGCTGGCG GGCTAGCTACAACGA GGCTGTTG | 7911 |
| 5849 | ACAGCCGC G CCAGCGAU | 3115 | ATCGCTGG GGCTAGCTACAACGA GCGGCTGT | 7912 |
| 5845 | CCGCGCCA G CGAUGCCG | 3116 | CGGCATCG GGCTAGCTACAACGA TGGCGCGG | 7913 |
| 5842 | CGCCAGCG A UGCCGGCG | 3117 | CGCCGGCA GGCTAGCTACAACGA CGCTGGCG | 7914 |
| 5840 | CCAGCGAU G CCGGCGCC | 3118 | GGCGCCGG GGCTAGCTACAACGA ATCGCTGG | 7915 |
| 5836 | CGAUGCCG G CGCCCACG | 3119 | CGTGGGCG GGCTAGCTACAACGA CGGCATCG | 7916 |
| 5834 | AUGCCGGC G CCCACGAA | 3120 | TTCGTGGG GGCTAGCTACAACGA GCCGGCAT | 7917 |
| 5830 | CGGCGCCC A CGAAGGCC | 3121 | GGCCTTCG GGCTAGCTACAACGA GGGCGCCG | 7918 |
| 5824 | CCACGAAG G CCGAAACG | 3122 | CGTTTCGG GGCTAGCTACAACGA CTTCGTGG | 7919 |
| 5818 | AGGCCGAA A CGGCUCUG | 3123 | CAGAGCCG GGCTAGCTACAACGA TTCGGCCT | 7920 |
| 5815 | CCGAAACG G CUCUGGGG | 3124 | CCCCAGAG GGCTAGCTACAACGA CGTTTCGG | 7921 |
| 5803 | UGGGGGGA G CGAGUUGG | 3125 | CCAACTCG GGCTAGCTACAACGA TCCCCCCA | 7922 |
| 5799 | GGGAGCGA G UUGGGCGG | 3126 | CCGCCCAA GGCTAGCTACAACGA TCGCTCCC | 7923 |
| 5794 | CGAGUUGG G CGGCCACC | 3127 | GGTGGCCG GGCTAGCTACAACGA CCAACTCG | 7924 |
| 5791 | GUUGGGCG G CCACCCAC | 3128 | GTGGGTGG GGCTAGCTACAACGA CGCCCAAC | 7925 |
| 5788 | GGGCGGCC A CCCACCCU | 3129 | AGGGTGGG GGCTAGCTACAACGA GGCCGCCC | 7926 |
| 5784 | GGCCACCC A CCCUCCCA | 3130 | TGGGAGGG GGCTAGCTACAACGA GGGTGGCC | 7927 |
| 5773 | CUCCCAAG A UGUUGAAC | 3131 | GTTCAACA GGCTAGCTACAACGA CTTGGGAG | 7928 |
| 5771 | CCCAAGAU G UUGAACAG | 3132 | CTGTTCAA GGCTAGCTACAACGA ATCTTGGG | 7929 |
| 5766 | GAUGUUGA A CAGGAGGG | 3133 | CCCTCCTG GGCTAGCTACAACGA TCAACATC | 7930 |
| 5758 | ACAGGAGG G UGCUUUGG | 3134 | CCAAAGCA GGCTAGCTACAACGA CCTCCTGT | 7931 |
| 5756 | AGGAGGGU G CUUUGGGU | 3135 | ACCCAAAG GGCTAGCTACAACGA ACCCTCCT | 7932 |
| 5749 | UGCUUUGG G UGGUGAGC | 3136 | GCTCACCA GGCTAGCTACAACGA CCAAAGCA | 7933 |
| 5746 | UUUGGGUG G UGAGCGGG | 3137 | CCCGCTCA GGCTAGCTACAACGA CACCCAAA | 7934 |
| 5742 | GGUGGUGA G CGGGCUGG | 3138 | CCAGCCCG GGCTAGCTACAACGA TCACCACC | 7935 |
| 5738 | GUGAGCGG G CUGGUGAU | 3139 | ATCACCAG GGCTAGCTACAACGA CCGCTCAC | 7936 |
| 5734 | GCGGGCUG G UGAUGGAG | 3140 | CTCCATCA GGCTAGCTACAACGA CAGCCCGC | 7937 |
| 5731 | GGCUGGUG A UGGAGGCU | 3141 | AGCCTCCA GGCTAGCTACAACGA CACCAGCC | 7938 |
| 5725 | UGAUGGAG G CUGUGAAU | 3142 | ATTCACAG GGCTAGCTACAACGA CTCCATCA | 7939 |
| 5722 | UGGAGGCU G UGAAUGCC | 3143 | GGCATTCA GGCTAGCTACAACGA AGCCTCCA | 7940 |
| 5718 | GGCUGUGA A UGCCAUCA | 3144 | TGATGGCA GGCTAGCTACAACGA TCACAGCC | 7941 |
| 5716 | CUGUGAAU G CCAUCAAU | 3145 | ATTGATGG GGCTAGCTACAACGA ATTCACAG | 7942 |
| 5713 | UGAAUGCC A UCAAUGAU | 3146 | ATCATTGA GGCTAGCTACAACGA GGCATTCA | 7943 |
| 5709 | UGCCAUCA A UGAUGCUA | 3147 | TAGCATCA GGCTAGCTACAACGA TGATGGCA | 7944 |
| 5706 | CAUCAAUG A UGCUAUCG | 3148 | CGATAGCA GGCTAGCTACAACGA CATTGATG | 7945 |
| 5704 | UCAACGAU G CUAUCGCG | 3149 | CGCGATAG GGCTAGCTACAACGA ATCATTGA | 7946 |
| 5701 | AUGAUGCU A UCGCGGGG | 3150 | CCCCGCGA GGCTAGCTACAACGA AGCATCAT | 7947 |
| 5698 | AUGCUAUC G CGGGGUUC | 3151 | GAACCCCG GGCTAGCTACAACGA GATAGCAT | 7948 |
| 5693 | AUCGCGGG G UUCCCAGG | 3152 | CCTGGGAA GGCTAGCTACAACGA CCCGCGAT | 7949 |
| 5685 | GUUCCCAG G CAGAGUGG | 3153 | CCACTCTG GGCTAGCTACAACGA CTGGGAAC | 7950 |
| 5680 | CAGGCAGA G UGGACAAG | 3154 | CTTGTCCA GGCTAGCTACAACGA TCTGCCTG | 7951 |
| 5676 | CAGAGUGG A CAAGCCUG | 3155 | CAGGCTTG GGCTAGCTACAACGA CCACTCTG | 7952 |
| 5672 | GUGGACAA G CCUGCUAG | 3156 | CTAGCAGG GGCTAGCTACAACGA TTGTCCAC | 7953 |
| 5668 | ACAAGCCU G CUAGGUAC | 3157 | GTACCTAG GGCTAGCTACAACGA AGGCTTGT | 7954 |
| 5663 | CCUGCUAG G UACUGUAU | 3158 | ATACAGTA GGCTAGCTACAACGA CTAGCAGG | 7955 |
| 5661 | UGCUAGGU A CUGUAUCC | 3159 | GGATACAG GGCTAGCTACAACGA ACCTAGCA | 7956 |
| 5658 | UAGGUACU G UAUCCCGC | 3160 | GCGGGATA GGCTAGCTACAACGA AGTACCTA | 7957 |
| 5656 | GGUACUGU A UCCCGCUG | 3161 | CAGCGGGA GGCTAGCTACAACGA ACAGTACC | 7958 |
| 5651 | UGUAUCCC G CUGAUGAA | 3162 | TTCATCAG GGCTAGCTACAACGA GGGATACA | 7959 |
| 5647 | UCCCGCUG A UGAAAUUC | 3163 | GAATTTCA GGCTAGCTACAACGA CAGCGGGA | 7960 |
| 5642 | CUGAUGAA A UUCCACAU | 3164 | ATGTGGAA GGCTAGCTACAACGA TTCATCAG | 7961 |
| 5637 | GAAAUUCC A CAUGUGCU | 3165 | AGCACATG GGCTAGCTACAACGA GGAATTTC | 7962 |
| 5635 | AAUUCCAC A UGUGCUUC | 3166 | GAAGCACA GGCTAGCTACAACGA GTGGAATT | 7963 |
| 5633 | UUCCACAU G UGCUUCGC | 3167 | GCGAAGCA GGCTAGCTACAACGA ATGTGGAA | 7964 |
| 5631 | CCACAUGU G CUUCGCCC | 3168 | GGGCGAAG GGCTAGCTACAACGA ACATGTGG | 7965 |
| 5626 | UGUGCUUC G CCCAGAAA | 3169 | TTTCTGGG GGCTAGCTACAACGA GAAGCACA | 7966 |
| 5617 | CCCAGAAA G CCUCAAGG | 3170 | CCTTGAGG GGCTAGCTACAACGA TTTCTGGG | 7967 |
| 5608 | CCUCAAGG G CUCGCCAC | 3171 | GTGGCGAG GGCTAGCTACAACGA CCTTGAGG | 7968 |
| 5604 | AAGGGCUC G CCACUUGG | 3172 | CCAAGTGG GGCTAGCTACAACGA GAGCCCTT | 7969 |
| 5601 | GGCUCGCC A CUUGGAUU | 3173 | AATCCAAG GGCTAGCTACAACGA GGCGAGCC | 7970 |
| 5595 | CCACUUGG A UUCCACCA | 3174 | TGGTGGAA GGCTAGCTACAACGA CCAAGTGG | 7971 |
| 5590 | UGGAUUCC A CCACGGGA | 3175 | TCCCGTGG GGCTAGCTACAACGA GGAATCCA | 7972 |
| 5587 | AUUCCACC A CGGGAGCA | 3176 | TGCTCCCG GGCTAGCTACAACGA GGTGGAAT | 7973 |
| 5581 | CCACGGGA G CAGCAGCC | 3177 | GGCTGCTG GGCTAGCTACAACGA TCCCGTGG | 7974 |
| 5578 | CGGGAGCA G CAGCCUCC | 3178 | GGAGGCTG GGCTAGCTACAACGA TGCTCCCG | 7975 |
| 5575 | GAGCAGCA G CCUCCGCU | 3179 | AGCGGAGG GGCTAGCTACAACGA TGCTGCTC | 7976 |
| 5569 | CAGCCUCC G CUUGGUUG | 3180 | CAACCAAG GGCTAGCTACAACGA GGAGGCTG | 7977 |
| 5564 | UCCGCUUG G UUGGUGGC | 3181 | GCCACCAA GGCTAGCTACAACGA CAAGCGGA | 7978 |
| 5560 | CUUGGUUG G UGGCUGUU | 3182 | AACAGCCA GGCTAGCTACAACGA CAACCAAG | 7979 |
| 5557 | GGUUGGUG G CUGUUUGC | 3183 | GCAAACAG GGCTAGCTACAACGA CACCAACC | 7980 |
| 5554 | UGGUGGCU G UUUGCAGC | 3184 | GCTGCAAA GGCTAGCTACAACGA AGCCACCA | 7981 |
| 5550 | GGCUGUUU G CAGCAAUC | 3185 | GATTGCTG GGCTAGCTACAACGA AAACAGCC | 7982 |
| 5547 | UGUUUGCA G CAAUCCGA | 3186 | TCGGATTG GGCTAGCTACAACGA TGCAAACA | 7983 |
| 5544 | UUGCAGCA A UCCGAGCG | 3187 | CGCTCGGA GGCTAGCTACAACGA TGCTGCAA | 7984 |
| 5538 | CAAUCCGA G CGCCUUCU | 3188 | AGAAGGCG GGCTAGCTACAACGA TCGGATTG | 7985 |
| 5536 | AUCCGAGC G CCUUCUGC | 3189 | GCAGAAGG GGCTAGCTACAACGA GCTCGGAT | 7986 |
| 5529 | CGCCUUCU G CUUGAACU | 3190 | AGTTCAAG GGCTAGCTACAACGA AGAAGGCG | 7987 |
| 5523 | CUGCUUGA A CUGCUCGG | 3191 | CCGAGCAG GGCTAGCTACAACGA TCAAGCAG | 7988 |
| 5520 | CUUGAACU G CUCGGCGA | 3192 | TCGCCGAG GGCTAGCTACAACGA AGTTCAAG | 7989 |
| 5515 | ACUGCUCG G CGAGCUGC | 3193 | GCAGCTCG GGCTAGCTACAACGA CGAGCAGT | 7990 |
| 5511 | CUCGGCGA G CUGCAUCC | 3194 | GGATGCAG GGCTAGCTACAACGA TCGCCGAG | 7991 |
| 5508 | GGCGAGCU G CAUCCCCU | 3195 | AGGGGATG GGCTAGCTACAACGA AGCTCGCC | 7992 |
| 5506 | CGAGCUGC A UCCCCUGU | 3196 | ACAGGGGA GGCTAGCTACAACGA GCAGCTCG | 7993 |
| 5499 | CAUCCCCU G UUCGAUGU | 3197 | ACATCGAA GGCTAGCTACAACGA AGGGGATG | 7994 |
| 5494 | CCUGUUCG A UGUAAGGG | 3198 | CCCTTACA GGCTAGCTACAACGA CGAACAGG | 7995 |
| 5492 | UGUUCGAU G UAAGGGAG | 3199 | CTCCCTTA GGCTAGCTACAACGA ATCGAACA | 7996 |
| 5483 | UAAGGGAG G UGUGAGGC | 3200 | GCCTCACA GGCTAGCTACAACGA CTCCCTTA | 7997 |
| 5481 | AGGGAGGU G UGAGGCAC | 3201 | GTGCCTCA GGCTAGCTACAACGA ACCTCCCT | 7998 |
| 5476 | GGUGUGAG G CACACUCC | 3202 | GGAGTGTG GGCTAGCTACAACGA CTCACACC | 7999 |
| 5474 | UGUGAGGC A CACUCCUC | 3203 | GAGGAGTG GGCTAGCTACAACGA GCCTCACA | 8000 |
| 5472 | UGAGGCAC A CUCCUCCA | 3204 | TGGAGGAG GGCTAGCTACAACGA GTGCCTCA | 8001 |
| 5464 | ACUCCUCC A UCUCAUCG | 3205 | CGATGAGA GGCTAGCTACAACGA GGAGGAGT | 8002 |
| 5459 | UCCAUCUC A UCGAACUC | 3206 | GAGTTCGA GGCTAGCTACAACGA GAGATGGA | 8003 |
| 5454 | CUCAUCGA A CUCCUGGU | 3207 | ACCAGGAG GGCTAGCTACAACGA TCGATGAG | 8004 |
| 5447 | AACUCCUG G UAGAGAGC | 3208 | GCTCTCTA GGCTAGCTACAACGA CAGGAGTT | 8005 |
| 5440 | GGUAGAGA G CCUCCCUG | 3209 | CAGGGAGG GGCTAGCTACAACGA TCTCTACC | 8006 |
| 5432 | GCCUCCCU G UCGGGGAU | 3210 | ATCCCCGA GGCTAGCTACAACGA AGGGAGGC | 8007 |
| 5425 | UGUCGGGG A UAACAGCC | 3211 | GGCTGTTA GGCTAGCTACAACGA CCCCGACA | 8008 |
| 5422 | CGGGGAUA A CAGCCGGC | 3212 | GCCGGCTG GGCTAGCTACAACGA TATCCCCG | 8009 |
| 5419 | GGAUAACA G CCGGCUUC | 3213 | GAAGCCGG GGCTAGCTACAACGA TGTTATCC | 8010 |
| 5415 | AACAGCCG G CUUCCCGG | 3214 | CCGGGAAG GGCTAGCTACAACGA CGGCTGTT | 8011 |
| 5406 | CUUCCCGG A CAAGAUGA | 3215 | TCATCTTG GGCTAGCTACAACGA CCGGGAAG | 8012 |
| 5401 | CGGACAAG A UGAUUCUG | 3216 | CAGAATCA GGCTAGCTACAACGA CTTGTCCG | 8013 |
| 5398 | ACAAGAUG A UUCUGCCC | 3217 | GGGCAGAA GGCTAGCTACAACGA CATCTTGT | 8014 |
| 5393 | AUGAUUCU G CCCACAAU | 3218 | ATTGTGGG GGCTAGCTACAACGA AGAATCAT | 8015 |
| 5389 | UUCUGCCC A CAAUGACC | 3219 | GGTCATTG GGCTAGCTACAACGA GGGCAGAA | 8016 |
| 5386 | UGCCCACA A UGACCACG | 3220 | CGTGGTCA GGCTAGCTACAACGA TGTGGGCA | 8017 |
| 5383 | CCACAAUG A CCACGCUG | 3221 | CAGCGTGG GGCTAGCTACAACGA CATTGTGG | 8018 |
| 5380 | CAAUGACC A CGCUGCCU | 3222 | AGGCAGCG GGCTAGCTACAACGA GGTCATTG | 8019 |
| 5378 | AUGACCAC G CUGCCUGU | 3223 | ACAGGCAG GGCTAGCTACAACGA GTGGTCAT | 8020 |
| 5375 | ACCACGCU G CCUGUCGU | 3224 | ACGACAGG GGCTAGCTACAACGA AGCGTGGT | 8021 |
| 5371 | CGCUGCCU G UCGUCAGG | 3225 | CCTGACGA GGCTAGCTACAACGA AGGCAGCG | 8022 |
| 5368 | UGCCUGUC G UCAGGCAA | 3226 | TTGCCTGA GGCTAGCTACAACGA GACAGGCA | 8023 |
| 5363 | GUCGUCAG G CAAUACGC | 3227 | GCGTATTG GGCTAGCTACAACGA CTGACGAC | 8024 |
| 5360 | GUCAGGCA A UACGCGGU | 3228 | ACCGCGTA GGCTAGCTACAACGA TGCCTGAC | 8025 |
| 5358 | CAGGCAAU A CGCGGUCA | 3229 | TGACCGCG GGCTAGCTACAACGA ATTGCCTG | 8026 |
| 5356 | GGCAAUAC G CGGUCAGA | 3230 | TCTGACCG GGCTAGCTACAACGA GTATTGCC | 8027 |
| 5353 | AAUACGCG G UCAGAGCU | 3231 | AGCTCTGA GGCTAGCTACAACGA CGCGTATT | 8028 |
| 5347 | CGGUCAGA G CUGCCAGG | 3232 | CCTGGCAG GGCTAGCTACAACGA TCTGACCG | 8029 |
| 5344 | UCAGAGCU G CCAGGACG | 3233 | CGTCCTGG GGCTAGCTACAACGA AGCTCTGA | 8030 |
| 5338 | CUGCCAGG A CGCCACCU | 3234 | AGGTGGCG GGCTAGCTACAACGA CCTGGCAG | 8031 |
| 5336 | GCCAGGAC G CCACCUAC | 3235 | GTAGGTGG GGCTAGCTACAACGA GTCCTGGC | 8032 |
| 5333 | AGGACGCC A CCUACUAG | 3236 | CTAGTAGG GGCTAGCTACAACGA GGCGTCCT | 8033 |
| 5329 | CGCCACCU A CUAGCACC | 3237 | GGTGCTAG GGCTAGCTACAACGA AGGTGGCG | 8034 |
| 5325 | ACCUACUA G CACCCAGG | 3238 | CCTGGGTG GGCTAGCTACAACGA TAGTAGGT | 8035 |
| 5323 | CUACUAGC A CCCAGGUG | 3239 | CACCTGGG GGCTAGCTACAACGA GCTAGTAG | 8036 |
| 5317 | GCACCCAG G UGCUGGUG | 3240 | CACCAGCA GGCTAGCTACAACGA CTGGGTGC | 8037 |
| 5315 | ACCCAGGU G CUGGUGAC | 3241 | GTCACCAG GGCTAGCTACAACGA ACCTGGGT | 8038 |
| 5311 | AGGUGCUG G UGACGACC | 3242 | GGTCGTCA GGCTAGCTACAACGA CAGCACCT | 8039 |
| 5308 | UGCUGGUG A CGACCUCC | 3243 | GGAGGTCG GGCTAGCTACAACGA CACCAGCA | 8040 |
| 5305 | UGGUGACG A CCUCCAGG | 3244 | CCTGGAGG GGCTAGCTACAACGA CGTCACCA | 8041 |
| 5297 | ACCUCCAG G UCAGCCGA | 3245 | TCGGCTGA GGCTAGCTACAACGA CTGGAGGT | 8042 |
| 5293 | CCAGGUCA G CCGACAUG | 3246 | CATGTCGG GGCTAGCTACAACGA TGACCTGG | 8043 |
| 5289 | GUCAGCCG A CAUGCAUG | 3247 | CATGCATG GGCTAGCTACAACGA CGGCTGAC | 8044 |
| 5287 | CAGCCGAC A UGCAUGUC | 3248 | GACATGCA GGCTAGCTACAACGA GTCGGCTG | 8045 |
| 5285 | GCCGACAU G CAUGUCAU | 3249 | ATGACATG GGCTAGCTACAACGA ATGTCGGC | 8046 |
| 5283 | CGACAUGC A UGUCAUGA | 3250 | TCATGACA GGCTAGCTACAACGA GCATGTCG | 8047 |
| 5281 | ACAUGCAU G UCAUGAUG | 3251 | CATCATGA GGCTAGCTACAACGA ATGCATGT | 8048 |
| 5278 | UGCAUGUC A UGAUGUAU | 3252 | ATACATCA GGCTAGCTACAACGA GACATGCA | 8049 |
| 5275 | AUGUCAUG A UGUAUUUG | 3253 | CAAATACA GGCTAGCTACAACGA CATCACAT | 8050 |
| 5273 | GUCAUGAU G UAUUUGGU | 3254 | ACCAAATA GGCTAGCTACAACGA ATCATGAC | 8051 |
| 5271 | CAUGAUGU A UUUGGUUA | 3255 | TAACCAAA GGCTAGCTACAACGA ACATCATG | 8052 |
| 5266 | UGUAUUUG G UUAUGGGG | 3256 | CCCCATAA GGCTAGCTACAACGA CAAATACA | 8053 |
| 5263 | AUUUGGUU A UGGGGUGU | 3257 | ACACCCCA GGCTAGCTACAACGA AACCAAAT | 8054 |
| 5258 | GUUAUGGG G UGUGUGAG | 3258 | CTCACACA GGCTAGCTACAACGA CCCATAAC | 8055 |
| 5256 | UAUGGGGU G UGUGAGGG | 3259 | CCCTCACA GGCTAGCTACAACGA ACCCCATA | 8056 |
| 5254 | UGGGGUGU G UGAGGGUG | 3260 | CACCCTCA GGCTAGCTACAACGA ACACCCCA | 8057 |
| 5248 | GUGUGAGG G UGACAUCA | 3261 | TGATGTCA GGCTAGCTACAACGA CCTCACAC | 8058 |
| 5245 | UGAGGGUG A CAUCAUUU | 3262 | AAATGATG GGCTAGCTACAACGA CACCCTCA | 8059 |
| 5243 | AGGGUGAC A UCAUUUUG | 3263 | CAAAATGA GGCTAGCTACAACGA GTCACCCT | 8060 |
| 5240 | GUGACAUC A UUUUGGAC | 3264 | GTCCAAAA GGCTAGCTACAACGA GATGTCAC | 8061 |
| 5233 | CAUUUUGG A CGGCUCCU | 3265 | AGGAGCCG GGCTAGCTACAACGA CCAAAATG | 8062 |
| 5230 | UUUGGACG G CUCCAUGC | 3266 | GCTAGGAG GGCTAGCTACAACGA CGTCCAAA | 8063 |
| 5223 | GGCUCCUA G CCUAUACA | 3267 | TGTATAGG GGCTAGCTACAACGA TAGGAGCC | 8064 |
| 5219 | CCUAGCCU A UACAGCAG | 3268 | CTGCTGTA GGCTAGCTACAACGA AGGCTAGG | 8065 |
| 5217 | UAGCCUAU A CAGCAGGG | 3269 | CCCTGCTG GGCTAGCTACAACGA ATAGGCTA | 8066 |
| 5214 | CCUAUACA G CAGGGGUG | 3270 | CACCCCTG GGCTAGCTACAACGA TGTATAGG | 8067 |
| 5208 | CAGCAGGG G UGUUGGCC | 3271 | GGCCAACA GGCTAGCTACAACGA CCCTGCTG | 8068 |
| 5206 | GCAGGGGU G UUGGCCCG | 3272 | CGGGCCAA GGCTAGCTACAACGA ACCCCTGC | 8069 |
| 5202 | GGGUGUUG G CCCGUGUA | 3273 | TACACGGG GGCTAGCTACAACGA CAACACCC | 8070 |
| 5198 | GUUGGCCC G UGUAGCGU | 3274 | ACGCTACA GGCTAGCTACAACGA GGGCCAAC | 8071 |
| 5196 | UGGCCCGU G UAGCGUAG | 3275 | CTACGCTA GGCTAGCTACAACGA ACGGGCCA | 8072 |
| 5193 | CCCGUGUA G CGUAGGCU | 3276 | AGCCTACG GGCTAGCTACAACGA TACACGGG | 8073 |
| 5191 | CGUGUAGC G UAGGCUUU | 3277 | AAAGCCTA GGCTAGCTACAACGA GCTACACG | 8074 |
| 5187 | UAGCGUAG G CUUUAGCC | 3278 | GGCTAAAG GGCTAGCTACAACGA CTACGCTA | 8075 |
| 5181 | AGGCUUUA G CCGUGUGA | 3279 | TCACACGG GGCTAGCTACAACGA TAAAGCCT | 8076 |
| 5178 | CUUUAGCC G UGUGAGAC | 3280 | GTCTCACA GGCTAGCTACAACGA GGCTAAAG | 8077 |
| 5276 | UUAGCCGU G UGAGACAC | 3281 | GTGTCTCA GGCTAGCTACAACGA ACGGCTAA | 8078 |
| 5171 | CGUGUGAG A CACUUCCA | 3282 | TGGAAGTG GGCTAGCTACAACGA CTCACACG | 8079 |
| 5169 | UGUGAGAC A CUUCCACA | 3283 | TGTGGAAG GGCTAGCTACAACGA GTCTCACA | 8080 |
| 5163 | ACACUUCC A CAUUUGAU | 3284 | ATCAAATG GGCTAGCTACAACGA GGAAGTGT | 8081 |
| 5161 | ACUUCCAC A UUUGAUCC | 3285 | GGATCAAA GGCTAGCTACAACGA GTGGAAGT | 8082 |
| 5156 | CACAUUUG A UCCCACGA | 3286 | TCGTGGGA GGCTAGCTACAACGA CAAATGTG | 8083 |
| 5151 | UUGAUCCC A CGAUGGGG | 3287 | CCCCATCG GGCTAGCTACAACGA GGGATCAA | 8084 |
| 5148 | AUCCCACG A UGGGGGUG | 3288 | CACCCCCA GGCTAGCTACAACGA CGTGGGAT | 8085 |
| 5142 | CGAUGGGG G UGGAGCCU | 3289 | AGGCTCCA GGCTAGCTACAACGA CCCCATCG | 8086 |
| 5137 | GGGGUGGA G CCUGAGCC | 3290 | GGCTCAGG GGCTAGCTACAACGA TCCACCCC | 8087 |
| 5131 | GAGCCUGA G CCCUGGCG | 3291 | CGCCAGGG GGCTAGCTACAACGA TCAGGCTC | 8088 |
| 5125 | GAGCCCUG G CGCACACU | 3292 | AGTGTGCG GGCTAGCTACAACGA CAGGGCTC | 8089 |
| 5123 | GCCCUGGC G CACACUGU | 3293 | ACAGTGTG GGCTAGCTACAACGA GCCAGGGC | 8090 |
| 5121 | CCUGGCGC A CACUGUGG | 3294 | CCACAGTG GGCTAGCTACAACGA GCGCCAAG | 8091 |
| 5119 | UGGCGCAC A CUGUGGCU | 3295 | AGCCACAG GGCTAGCTACAACGA GTGCGCCA | 8092 |
| 5116 | CGCACACU G UGGCUUGG | 3296 | CCAAGCCA GGCTAGCTACAACGA AGTGTGCG | 8093 |
| 5113 | ACACUGUG G CUUGGUAU | 3297 | ATACCAAG GGCTAGCTACAACGA CACAGTGT | 8094 |
| 5108 | GUGGCUUG G UAUGCUAC | 3298 | GTAGCATA GGCTAGCTACAACGA CAAGCCAC | 8095 |
| 5106 | GGCUUGGU A UGCUACCA | 3299 | TGGTAGCA GGCTAGCTACAACGA ACCAAGCC | 8096 |
| 5104 | CUUGGUAU G CUACCAGG | 3300 | CCTGGTAG GGCTAGCTACAACGA ATACCAAG | 8097 |
| 5101 | GGUAUGCU A CCAGGUAG | 3301 | CTACCTGG GGCTAGCTACAACGA AGCATACC | 8098 |
| 5096 | GCUACCAG G UAGGGGAG | 3302 | CTCCCCTA GGCTAGCTACAACGA CTGGTAGC | 8099 |
| 5087 | UAGGGGAG G UUUUCUCC | 3303 | GGAGAAAA GGCTAGCTACAACGA CTCCCCTA | 8100 |
| 5077 | UUUCUCCU G CCUGCUUG | 3304 | CAAGCAGG GGCTAGCTACAACGA AGGAGAAA | 8101 |
| 5073 | UCCUGCCU G CUUGGUCU | 3305 | AGACCAAG GGCTAGCTACAACGA AGGCAGGA | 8102 |
| 5068 | CCUGCUUG G UCUGGGAC | 3306 | GTCCCAGA GGCTAGCTACAACGA CAAGCAGG | 8103 |
| 5061 | GGUCUGGG A CAAGAAGU | 3307 | ACTTCTTG GGCTAGCTACAACGA CCCAGACC | 8104 |
| 5054 | GACAAGAA G UGGGCAUC | 3308 | GATGCCCA GGCTAGCTACAACGA TTCTTGTC | 8105 |
| 5050 | AGAAGUGG G CAUCUAUG | 3309 | CATAGATG GGCTAGCTACAACGA CCACTTCT | 8106 |
| 5048 | AAGUGGGC A UCUAUGUG | 3310 | CACATAGA GGCTAGCTACAACGA GCCCACTT | 8107 |
| 5044 | GGGCAUCU A UGUGGGUG | 3311 | CACCCACA GGCTAGCTACAACGA AGATGCCC | 8108 |
| 5042 | GCAUCUAU G UGGGUGAG | 3312 | CTCACCCA GGCTAGCTACAACGA ATAGATGC | 8109 |
| 5038 | CUAUGUGG G UGAGGCCU | 3313 | AGGCCTCA GGCTAGCTACAACGA CCACATAG | 8110 |
| 5033 | UGGGUGAG G CCUGUGAA | 3314 | TTCACAGG GGCTAGCTACAACGA CTCACCCA | 8111 |
| 5029 | UGAGGCCU G UGAAGACA | 3315 | TGTCTTCA GGCTAGCTACAACGA AGGCCTCA | 8112 |
| 5023 | CUGUGAAG A CACCCUCC | 3316 | GGAGGGTG GGCTAGCTACAACGA CTTCACAG | 8113 |
| 5021 | GUGAAGAC A CCCUCCCA | 3317 | TGGGAGGG GGCTAGCTACAACGA GTCTTCAC | 8114 |
| 5010 | CUCCCAGA A CUCCAGAU | 3318 | ATCTGGAG GGCTAGCTACAACGA TCTGGGAG | 8115 |
| 5003 | AACUCCAG A UGGUCCUG | 3319 | CAGGACCA GGCTAGCTACAACGA CTGGAGTT | 8116 |
| 5000 | UCCAGAUG G UCCUGGCA | 3320 | TGCCAGGA GGCTAGCTACAACGA CATCTGGA | 8117 |
| 4994 | UGGUCCUG G CAGAAGGG | 3321 | CCCTTCTG GGCTAGCTACAACGA CAGGACCA | 8118 |
| 4986 | GCAGAAGG G CAACCCUG | 3322 | CAGGGTTG GGCTAGCTACAACGA CCTTCTGC | 8119 |
| 4983 | GAAGGGCA A CCCUGGUG | 3323 | CACCAGGG GGCTAGCTACAACGA TGCCCTTC | 8120 |
| 4977 | CAACCCUG G UGUAUUUA | 3324 | TAAATACA GGCTAGCTACAACGA CAGGGTTG | 8121 |
| 4975 | ACCCUGGU G UAUUUAGG | 3325 | CCTAAATA GGCTAGCTACAACGA ACCAGGGT | 8122 |
| 4973 | CCUGGUGU A UUUAGGUA | 3326 | TACCTAAA GGCTAGCTACAACGA ACACCAGG | 8123 |
| 4967 | GUAUUUAG G UAAGCCCG | 3327 | CGGGCTTA GGCTAGCTACAACGA CTAAATAC | 8124 |
| 4963 | UUAGGUAA G CCCGCAAC | 3328 | GTTGCGGG GGCTAGCTACAACGA TTACCTAA | 8125 |
| 4959 | GUAAGCCC G CAACCUAA | 3329 | TTAGGTTG GGCTAGCTACAACGA GGGCTTAC | 8126 |
| 4956 | AGCCCGCA A CCUAACGG | 3330 | CCGTTAGG GGCTAGCTACAACGA TGCGGGCT | 8127 |
| 4951 | GCAACCUA A CGGAGGUC | 3331 | GACCTCCG GGCTAGCTACAACGA TAGGTTGC | 8128 |
| 4945 | UAACGGAG G UCUCGGCG | 3332 | CGCCGAGA GGCTAGCTACAACGA CTCCGTTA | 8129 |
| 4939 | AGGUCUCG G CGGGCGUG | 3333 | CACGCCCG GGCTAGCTACAACGA CGAGACCT | 8130 |
| 4935 | UAACGGAG G UCUCGGCG | 3334 | AGCTCACG GGCTAGCTACAACGA CCGCCGAG | 8131 |
| 4933 | CGGCGGGC G UGAGCUCG | 3335 | CGAGCTCA GGCTAGCTACAACGA GCCCGCCG | 8132 |
| 4929 | GGGCGUGA G CUCGUACC | 3336 | GGTACGAG GGCTAGCTACAACGA TCACGCCC | 8133 |
| 4925 | GUGAGCUC G UACCAAGC | 3337 | GCTTGGTA GGCTAGCTACAACGA GAGCTCAC | 8134 |
| 4923 | GAGCUCGU A CCAAGCAC | 3338 | GTGCTTGG GGCTAGCTACAACGA ACGAGCTC | 8135 |
| 4918 | CGUACCAA G CACAUCCC | 3339 | GGGATGTG GGCTAGCTACAACGA TTGGTACG | 8136 |
| 4916 | UACCAAGC A CAUCCCGC | 3340 | GCGGGATG GGCTAGCTACAACGA GCTTGGTA | 8137 |
| 4914 | CCAAGCAC A UCCCGCGU | 3341 | ACGCGGGA GGCTAGCTACAACGA GTGCTTGG | 8138 |
| 4909 | CACAUCCC G CGUCAUAG | 3342 | CTATGACG GGCTAGCTACAACGA GGGATGTG | 8139 |
| 4907 | CAUCCCGC G UCAUAGCA | 3343 | TGCTATGA GGCTAGCTACAACGA GCGGGATG | 8140 |
| 4904 | CCCGCGUC A UAGCACUC | 3344 | GAGTGCTA GGCTAGCTACAACGA GACGCGGG | 8141 |
| 4901 | GCGUCAUA G CACUCACA | 3345 | TGTGAGTG GGCTAGCTACAACGA TATGACGC | 8142 |
| 4899 | GUCAUAGC A CUCACACA | 3346 | TGTGTGAG GGCTAGCTACAACGA GCTATGAC | 8143 |
| 4895 | UAGCACUC A CACAGGAC | 3347 | GTCCTGTG GGCTAGCTACAACGA GAGTGCTA | 8144 |
| 4893 | GCACUCAC A CAGGACCG | 3348 | CGGTCCTG GGCTAGCTACAACGA GTGAGTGC | 8145 |
| 4888 | CACACAGG A CCGAGGAG | 3349 | CTCCTCGG GGCTAGCTACAACGA CCTGTGTG | 8146 |
| 4880 | ACCGAGGA G UCGAACAU | 3350 | ATGTTCGA GGCTAGCTACAACGA TCCTCGGT | 8147 |
| 4875 | GGAGUCGA A CAUGCCCG | 3351 | CGGGCATG GGCTAGCTACAACGA TCGACTCC | 8148 |
| 4873 | AGUCGAAC A UGCCCGAA | 3352 | TTCGGGCA GGCTAGCTACAACGA GTTCGACT | 8149 |
| 4871 | UCGAACAU G CCCGAAGG | 3353 | CCTTCGGG GGCTAGCTACAACGA ATGTTCGA | 8150 |
| 4863 | GCCCGAAG G CCGCUCUC | 3354 | GAGAGCGG GGCTAGCTACAACGA CTTCGGGC | 8151 |
| 4860 | CGAAGGCC G CUCUCCUG | 3355 | CAGGAGAG GGCTAGCTACAACGA GGCCTTCG | 8152 |
| 4849 | CUCCUGGA G UCACAAAC | 3356 | GTTTGTGA GGCTAGCTACAACGA TCCAGGAG | 8153 |
| 4846 | CUGGAGUC A CAAACCUG | 3357 | CAGGTTTG GGCTAGCTACAACGA GACTCCAG | 8154 |
| 4842 | AGUCACAA A CCUGUAUA | 3358 | TATACAGG GGCTAGCTACAACGA TTGTGACT | 8155 |
| 4838 | ACAAACCU G UAUAUGCC | 3359 | GGCATATA GGCTAGCTACAACGA AGGTTTGT | 8156 |
| 4836 | AAACCUGU A UAUGCCUC | 3360 | GAGGCATA GGCTAGCTACAACGA ACAGGTTT | 8157 |
| 4834 | ACCUGUAU A UGCCUCUC | 3361 | GAGAGGCA GGCTAGCTACAACGA ATACAGGT | 8158 |
| 4832 | CUGUAUAU G CCUCUCCU | 3362 | AGGAGAGG GGCTAGCTACAACGA ATATACAG | 8159 |
| 4823 | CCUCUCCU G CCCCUACC | 3363 | GGTAGGGG GGCTAGCTACAACGA AGGAGAGG | 8160 |
| 4817 | CUGCCCCU A CCGGUCCU | 3364 | AGGACCGG GGCTAGCTACAACGA AGGGGCAG | 8161 |
| 4813 | CCCUACCG G UCCUACCU | 3365 | AGGTAGGA GGCTAGCTACAACGA CGGTAGGG | 8162 |
| 4808 | CCGGUCCU A CCUCGCCU | 3366 | AGGCGAGG GGCTAGCTACAACGA AGGACCGG | 8163 |
| 4803 | CCUACCUC G CCUCUGCG | 3367 | CGCAGAGG GGCTAGCTACAACGA GAGGTAGG | 8164 |
| 4797 | UCGCCUCU G CGAGCGGG | 3368 | CCCGCTCG GGCTAGCTACAACGA AGAGGCGA | 8165 |
| 4793 | CUCUGCGA G CGGGACAC | 3369 | GTGTCCCG GGCTAGCTACAACGA TCGCAGAG | 8166 |
| 4788 | CGAGCGGG A CACUGCGU | 3370 | ACGCAGTG GGCTAGCTACAACGA CCCGCTCG | 8167 |
| 4786 | AGCGGGAC A CUGCGUCU | 3371 | AGACGCAG GGCTAGCTACAACGA GTCCCGCT | 8168 |
| 4783 | GGGACACU G CGUCUUGG | 3372 | CCAAGACG GGCTAGCTACAACGA AGTGTCCC | 8169 |
| 4781 | GACACUGC G UCUUGGGG | 3373 | CCCCAAGA GGCTAGCTACAACGA GCAGTGTC | 8170 |
| 4773 | GUCUUGGG G CACGGUCG | 3374 | CGACCGTG GGCTAGCTACAACGA CCCAAGAC | 8171 |
| 4771 | CUUGGGGC A CGGUCGUC | 3375 | GACGACCG GGCTAGCTACAACGA GCCCCAAG | 8172 |
| 4768 | GGGGCACG G UCGUCGUC | 3376 | GACGACGA GGCTAGCTACAACGA CGTGCCCC | 8173 |
| 4765 | GCACGGUC G UCGUCUCA | 3377 | TGAGACGA GGCTAGCTACAACGA GACCGTGC | 8174 |
| 4762 | CGGUCGUC G UCUCAAUG | 3378 | CATTGAGA GGCTAGCTACAACGA GACGACCG | 8175 |
| 4756 | UCGUCUCA A UGGUGAAG | 3379 | CTTCACCA GGCTAGCTACAACGA TGAGACGA | 8176 |
| 4753 | UCUCAAUG G UGAAGGUA | 3380 | TACCTTCA GGCTAGCTACAACGA CATTGAGA | 8177 |
| 4747 | UGGUGAAG G UAGGGUCC | 3381 | GGACCCTA GGCTAGCTACAACGA CTTCACCA | 8178 |
| 4742 | AAGGUAGG G UCCAAGCU | 3382 | AGCTTGGA GGCTAGCTACAACGA CCTACCTT | 8179 |
| 4736 | GGGUCCAA G CUGAAGUC | 3383 | GACTTCAG GGCTAGCTACAACGA TTGGACCC | 8180 |
| 4730 | AAGCUGAA G UCGACUGU | 3384 | ACAGTCGA GGCTAGCTACAACGA TTCAGCTT | 8181 |
| 4726 | UGAAGUCG A CUGUUUGG | 3385 | CCAAACAG GGCTAGCTACAACGA CGACTTCA | 8182 |
| 4723 | AGUCGACU G UUUGGGUG | 3386 | CACCCAAA GGCTAGCTACAACGA AGTCGACT | 8183 |
| 4717 | CUGUUUGG G UGACACAU | 3387 | ATGTGTCA GGCTAGCTACAACGA CCAAACAG | 8184 |
| 4714 | UUUGGGUG A CACAUGUA | 3388 | TACATGTG GGCTAGCTACAACGA CACCCAAA | 8185 |
| 4712 | UGGGUGAC A CAUGUAUU | 3389 | AATACATG GGCTAGCTACAACGA GTCACCCA | 8186 |
| 4710 | GGUGACAC A UGUAUUAC | 3390 | GTAATACA GGCTAGCTACAACGA GTGTCACC | 8187 |
| 4708 | UGACACAU G UAUUACAG | 3391 | CTGTAATA GGCTAGCTACAACGA ATGTGTCA | 8188 |
| 4706 | ACACAUGU A UUACAGUC | 3392 | GACTGTAA GGCTAGCTACAACGA ACATGTGT | 8189 |
| 4703 | CAUGUAUU A CAGUCGAU | 3393 | ATCGACTG GGCTAGCTACAACGA AATACATG | 8190 |
| 4700 | GUAUUACA G UCGAUCAC | 3394 | GTGATCGA GGCTAGCTACAACGA TGTAATAC | 8191 |
| 4696 | UACAGUCG A UCACCGAG | 3395 | CTCGGTGA GGCTAGCTACAACGA CGACTGTA | 8192 |
| 4693 | AGUCGAUC A CCGAGUCA | 3396 | TGACTCGG GGCTAGCTACAACGA GATCGACT | 8193 |
| 4688 | AUCACCGA G UCAAAAUC | 3397 | GATTTTGA GGCTAGCTACAACGA TCGGTGAT | 8194 |
| 4682 | GAGUCAAA A UCGCCGGU | 3398 | ACCGGCGA GGCTAGCTACAACGA TTTGACTC | 8195 |
| 4679 | UCAAAAUC G CCGGUAUA | 3399 | TATACCGG GGCTAGCTACAACGA GATTTTGA | 8196 |
| 4675 | AAUCGCCG G UAUAGCCC | 3400 | GGGCTATA GGCTAGCTACAACGA CGGCGATT | 8197 |
| 4673 | UCGCCGGU A UAGCCCGU | 3401 | ACGGGCTA GGCTAGCTACAACGA ACCGGCGA | 8198 |
| 4670 | CCGGUAUA G CCCGUCAU | 3402 | ATGACGGG GGCTAGCTACAACGA TATACCGG | 8199 |
| 4666 | UAUAGCCC G UCAUUAGA | 3403 | TCTAATGA GGCTAGCTACAACGA GGGCTATA | 8200 |
| 4663 | AGCCCGUC A UUAGAGCG | 3404 | CGCTCTAA GGCTAGCTACAACGA GACGGGCT | 8201 |
| 4657 | UCAUUAGA G CGUCUGUU | 3405 | AACAGACG GGCTAGCTACAACGA TCTAATGA | 8202 |
| 4655 | AUUAGAGC G UCUGUUGC | 3406 | GCAACAGA GGCTAGCTACAACGA GCTCTAAT | 8203 |
| 4651 | GAGCGUCU G UUGCCACG | 3407 | CGTGGCAA GGCTAGCTACAACGA AGACGCTC | 8204 |
| 4648 | CGUCUGUU G CCACGACA | 3408 | TGTCGTGG GGCTAGCTACAACGA AACAGACG | 8205 |
| 4645 | CUGUUGCC A CGACAACG | 3409 | CGTTGTCG GGCTAGCTACAACGA GGCAACAG | 8206 |
| 4642 | UUGCCACG A CAACGACG | 3410 | CGTCGTTG GGCTAGCTACAACGA CGTGGCAA | 8207 |
| 4639 | CCACGACA A CGACGUCC | 3411 | GGACGTCG GGCTAGCTACAACGA TGTCGTGG | 8208 |
| 4636 | CGACAACG A CGUCCCCG | 3412 | CGGGGACG GGCTAGCTACAACGA CGTTGTCG | 8209 |
| 4634 | ACAACGAC G UCCCCGCU | 3413 | AGCGGGGA GGCTAGCTACAACGA GTCGTTGT | 8210 |
| 4628 | ACGUCCCC G CUGGCCGG | 3414 | CCGGCCAG GGCTAGCTACAACGA GGGGACGT | 8211 |
| 4624 | CCCCGCUG G CCGGUAUG | 3415 | CATACCGG GGCTAGCTACAACGA CAGCGGGG | 8212 |
| 4620 | GCUGGCCG G UAUGACGG | 3416 | CCGTCATA GGCTAGCTACAACGA CGGCCAGC | 8213 |
| 4618 | UGGCCGGU A UGACGGAC | 3417 | GTCCGTCA GGCTAGCTACAACGA ACCGGCCA | 8214 |
| 4615 | CCGGUAUG A CGGACACG | 3418 | CGTGTCCG GGCTAGCTACAACGA CATACCGG | 8215 |
| 4611 | UAUGACGG A CACGUCGA | 3419 | TCGACGTG GGCTAGCTACAACGA CCGTCATA | 8216 |
| 4609 | UGACGGAC A CGUCGAGA | 3420 | TCTCGACG GGCTAGCTACAACGA GTCCGTCA | 8217 |
| 4607 | ACGGACAC G UCGAGACC | 3421 | GGTCTCGA GGCTAGCTACAACGA GTGTCCGT | 8218 |
| 4601 | ACGUCGAG A CCCCGGUA | 3422 | TACCGGGG GGCTAGCTACAACGA CTCGACGT | 8219 |
| 4595 | AGACCCCG G UAAUACGC | 3423 | GCGTATTA GGCTAGCTACAACGA CGGGGTCT | 8220 |
| 4592 | CCCCGGUA A UACGCUAC | 3424 | GTAGCGTA GGCTAGCTACAACGA TACCGGGG | 8221 |
| 4590 | CCGGUAAU A CGCUACAG | 3425 | CTGTAGCG GGCTAGCTACAACGA ATTACCGG | 8222 |
| 4588 | GGUAAUAC G CUACAGCG | 3426 | CGCTGTAG GGCTAGCTACAACGA GTATTACC | 8223 |
| 4585 | AAUACGCU A CAGCGUUA | 3427 | TAACGCTG GGCTAGCTACAACGA AGCGTATT | 8224 |
| 4582 | ACGCUACA G CGUUAAGU | 3428 | ACTTAACG GGCTAGCTACAACGA TGTAGCGT | 8225 |
| 4580 | GCUACAGC G UUAAGUCC | 3429 | GGACTTAA GGCTAGCTACAACGA GCTGTAGC | 8226 |
| 4575 | AGCGUUAA G UCCGAGGC | 3430 | GCCTCGGA GGCTAGCTACAACGA TTAACGCT | 8227 |
| 4568 | AGUCCGAG G CCCGACAG | 3431 | CTGTCGGG GGCTAGCTACAACGA CTCGGACT | 8228 |
| 4563 | GAGGCCCG A CAGCUUUG | 3432 | CAAAGCTG GGCTAGCTACAACGA CGGGCCTC | 8229 |
| 4560 | GCCCGACA G CUUUGCAG | 3433 | CTGCAAAG GGCTAGCTACAACGA TGTCGGGC | 8230 |
| 4555 | ACAGCUUU G CAGCGAGC | 3434 | GCTCGCTG GGCTAGCTACAACGA AAAGCTGT | 8231 |
| 4552 | GCUUUGCA G CGAGCUCG | 3435 | CGAGCTCG GGCTAGCTACAACGA TGCAAAGC | 8232 |
| 4548 | UGCAGCGA G CUCGUCAC | 3436 | GTGACGAG GGCTAGCTACAACGA TCGCTGCA | 8233 |
| 4544 | GCGAGCUC G UCACAUUU | 3437 | AAATGTGA GGCTAGCTACAACGA GAGCTCGC | 8234 |
| 4541 | AGCUCGUC A CAUUUCUU | 3438 | AAGAAATG GGCTAGCTACAACGA GACGAGCT | 8235 |
| 4539 | CUCGUCAC A UUUCUUCU | 3439 | AGAAGAAA GGCTAGCTACAACGA GTGACGAG | 8236 |
| 4526 | UUCUUGGA A UGGCAGAA | 3440 | TTCTGCCA GGCTAGCTACAACGA TCCAAGAA | 8237 |
| 4523 | UUGGAAUG G CAGAAGAU | 3441 | ATCTTCTG GGCTAGCTACAACGA CATTCCAA | 8238 |
| 4516 | GGCAGAAG A UGAGAUGC | 3442 | GCATCTCA GGCTAGCTACAACGA CTTCTGCC | 8239 |
| 4511 | AAGAUGAG A UGCCUCCC | 3443 | GGGAGGCA GGCTAGCTACAACGA CTCATCTT | 8240 |
| 4509 | GAUGAGAU G CCUCCCCC | 3444 | GGGGGAGG GGCTAGCTACAACGA ATCTCATC | 8241 |
| 4495 | CCCCUUUG A UGGUCUCG | 3445 | CGAGACCA GGCTAGCTACAACGA CAAAGGGG | 8242 |
| 4492 | CUUUGAUG G UCUCGAUG | 3446 | CATCGAGA GGCTAGCTACAACGA CATCAAAG | 8243 |
| 4486 | UGGUCUCG A UGGGGAUG | 3447 | CATCCCCA GGCTAGCTACAACGA CGAGACCA | 8244 |
| 4480 | CGAUGGGG A UGGCUUUG | 3448 | CAAAGCCA GGCTAGCTACAACGA CCCCATCG | 8245 |
| 4477 | UGGGGAUG G CUUUGCCA | 3449 | TGGCAAAG GGCTAGCTACAACGA CATCCCCA | 8246 |
| 4472 | AUGGCUUU G CCAUAGAA | 3450 | TTCTATGG GGCTAGCTACAACGA AAAGCCAT | 8247 |
| 4469 | GCUUUGCC A UAGAAGGG | 3451 | CCCTTCTA GGCTAGCTACAACGA GGCAAAGC | 8248 |
| 4459 | AGAAGGGG A UCUCUCCG | 3452 | CGGAGAGA GGCTAGCTACAACGA CCCCTTCT | 8249 |
| 4450 | UCUCUCCG G UGUUGGAC | 3453 | GTCCAACA GGCTAGCTACAACGA CGGAGAGA | 8250 |
| 4448 | UCUCCGGU G UUGGACAA | 3454 | TTGTCCAA GGCTAGCTACAACGA ACCGGAGA | 8251 |
| 4443 | GGUGUUGG A CAAGGCUA | 3455 | TAGCCTTG GGCTAGCTACAACGA CCAACACC | 8252 |
| 4438 | UGGACAAG G CUAUCUCC | 3456 | GGAGATAG GGCTAGCTACAACGA CTTGTCCA | 8253 |
| 4435 | ACAAGGCU A UCUCCUCG | 3457 | CGAGGAGA GGCTAGCTACAACGA AGCCTTGT | 8254 |
| 4426 | UCUCCUCG A UGUUGGGA | 3458 | TCCCAACA GGCTAGCTACAACGA CGAGGAGA | 8255 |
| 4424 | UCCUCGAU G UUGGGAUG | 3459 | CATCCCAA GGCTAGCTACAACGA ATCGAGGA | 8256 |
| 4418 | AUGUUGGG A UGUGGCAC | 3460 | GTGCCACA GGCTAGCTACAACGA CCCAACAT | 8257 |
| 4416 | GUUGGGAU G UGGCACGG | 3461 | CCGTGCCA GGCTAGCTACAACGA ATCCCAAC | 8258 |
| 4413 | GGGAUGUG G CACGGUGA | 3462 | TCACCGTG GGCTAGCTACAACGA CACATCCC | 8259 |
| 4411 | GAUGUGGC A CGGUGACC | 3463 | GGTCACCG GGCTAGCTACAACGA GCCACATC | 8260 |
| 4408 | GUGGCACG G UGACCGAU | 3464 | ATCGGTCA GGCTAGCTACAACGA CGTGCCAC | 8261 |
| 4405 | GCACGGUG A CCGAUCCC | 3465 | GGGATCGG GGCTAGCTACAACGA CACCGTGC | 8262 |
| 4401 | GGUGACCG A UCCCGGAG | 3466 | CTCCGGGA GGCTAGCTACAACGA CGGTCACC | 8263 |
| 4392 | UCCCGGAG G CGUAGCGG | 3467 | CCGCTACG GGCTAGCTACAACGA CTCCGGGA | 8264 |
| 4390 | CCGGAGGC G UAGCGGUG | 3468 | CACCGCTA GGCTAGCTACAACGA GCCTCCGG | 8265 |
| 4387 | GAGGCGUA G CGGUGGCG | 3469 | CGCCACCG GGCTAGCTACAACGA TACGCCTC | 8266 |
| 4384 | GCGUAGCG G UGGCGAGC | 3470 | GCTCGCCA GGCTAGCTACAACGA CGCTACGC | 8267 |
| 4381 | UAGCGGUG G CGAGCACG | 3471 | CGTGCTCG GGCTAGCTACAACGA CACCGCTA | 8268 |
| 4377 | GGUGGCGA G CACGACGA | 3472 | TCGTCGTG GGCTAGCTACAACGA TCGCCACC | 8269 |
| 4375 | UGGCGAGC A CGACGAGC | 3473 | GCTCGTCG GGCTAGCTACAACGA GCTCGCCA | 8270 |
| 4372 | CGAGCACG A CGAGCCGC | 3474 | GCGGCTCG GGCTAGCTACAACGA CGTGCTCG | 8271 |
| 4368 | CACGACGA G CCGCGCUC | 3475 | GAGCGCGG GGCTAGCTACAACGA TCGTCGTG | 8272 |
| 4365 | GACGAGCC G CGCUCCAG | 3476 | CTGGAGCG GGCTAGCTACAACGA GGCTCGTC | 8273 |
| 4363 | CGAGCCGC G CUCCAGCC | 3477 | GGCTGGAG GGCTAGCTACAACGA GCGGCTCG | 8274 |
| 4357 | GCGCUCCA G CCGUCUCC | 3478 | GGAGACGG GGCTAGCTACAACGA TGGAGCGC | 8275 |
| 4354 | CUCCAGCC G UCUCCGCU | 3479 | AGCGGAGA GGCTAGCTACAACGA GGCTGGAG | 8276 |
| 4348 | CCGUCUCC G CUUGGUCC | 3480 | GGACCAAG GGCTAGCTACAACGA GGAGACGG | 8277 |
| 4343 | UCCGCUUG G UCCAGGAC | 3481 | GTCCTGGA GGCTAGCTACAACGA CAAGCGGA | 8278 |
| 4336 | GGUCCAGG A CUGUGCCG | 3482 | CGGCACAG GGCTAGCTACAACGA CCTGGACC | 8279 |
| 4333 | CCAGGACU G UGCCGAUG | 3483 | CATCGGCA GGCTAGCTACAACGA AGTCCTGG | 8280 |
| 4331 | AGGACUGU G CCGAUGCC | 3484 | GGCATCGG GGCTAGCTACAACGA ACAGTCCT | 8281 |
| 4327 | CUGUGCCG A UGCCCAAA | 3485 | TTTGGGCA GGCTAGCTACAACGA CGGCACAG | 8282 |
| 4325 | GUGCCGAU G CCCAAAAU | 3486 | ATTTTGGG GGCTAGCTACAACGA ATCGGCAC | 8283 |
| 4318 | UGCCCAAA A UGGAAGUC | 3487 | GACTTCCA GGCTAGCTACAACGA TTTGGGCA | 8284 |
| 4312 | AAAUGGAA G UCGAGUCA | 3488 | TGACTCGA GGCTAGCTACAACGA TTCCATTT | 8285 |
| 4307 | GAAGUCGA G UCAAUUGA | 3489 | TCAATTGA GGCTAGCTACAACGA TCGACTTC | 8286 |
| 4303 | UCGAGUCA A UUGAGUGG | 3490 | CCACTCAA GGCTAGCTACAACGA TGACTCGA | 8287 |
| 4298 | UCAAUUGA G UGGCACUC | 3491 | GAGTGCCA GGCTAGCTACAACGA TCAATTGA | 8288 |
| 4295 | AUUGAGUG G CACUCAUC | 3492 | GATGAGTG GGCTAGCTACAACGA CACTCAAT | 8289 |
| 4293 | UGAGUGGC A CUCAUCAC | 3493 | GTGATGAG GGCTAGCTACAACGA GCCACTCA | 8290 |
| 4289 | UGGCACUC A UCACACAU | 3494 | ATGTGTGA GGCTAGCTACAACGA GAGTGCCA | 8291 |
| 4286 | CACUCAUC A CACAUUAU | 3495 | ATAATGTG GGCTAGCTACAACGA GATGAGTG | 8292 |
| 4284 | CUCAUCAC A CAUUAUGA | 3496 | TCATAATG GGCTAGCTACAACGA GTGATGAG | 8293 |
| 4282 | CAUCACAC A UUAUGAUG | 3497 | CATCATAA GGCTAGCTACAACGA GTGTGATG | 8294 |
| 4279 | CACACAUU A UGAUGUCA | 3498 | TGACATCA GGCTAGCTACAACGA AATGTGTG | 8295 |
| 4276 | ACAUUAUG A UGUCAUAG | 3499 | CTATGACA GGCTAGCTACAACGA CATAATGT | 8296 |
| 4274 | AUUAUGAU G UCAUAGGC | 3500 | GCCTATGA GGCTAGCTACAACGA ATCATAAT | 8297 |
| 4271 | AUGAUGUC A UAGGCGCC | 3501 | GGCGCCTA GGCTAGCTACAACGA GACATCAT | 8298 |
| 4267 | UGUCAUAG G CGCCCCCA | 3502 | TGGGGGCG GGCTAGCTACAACGA CTATGACA | 8299 |
| 4265 | UCAUAGGC G CCCCCAGA | 3503 | TCTGGGGG GGCTAGCTACAACGA GCCTATGA | 8300 |
| 4256 | CCCCCAGA G CAACCACC | 3504 | GGTGGTTG GGCTAGCTACAACGA TCTGGGGG | 8301 |
| 4253 | CCAGAGCA A CCACCGUC | 3505 | GACGGTGG GGCTAGCTACAACGA TGCTCTGG | 8302 |
| 4250 | GAGCAACC A CCGUCGGC | 3506 | GCCGACGG GGCTAGCTACAACGA GGTTGCTC | 8303 |
| 4247 | CAACCACC G UCGGCAAG | 3507 | CTTGCCGA GGCTAGCTACAACGA GGTGGTTG | 8304 |
| 4243 | CACCGUCG G CAAGGAAC | 3508 | GTTCCTTG GGCTAGCTACAACGA CGACGGTG | 8305 |
| 4236 | GGCAAGGA A CUUGCCAU | 3509 | ATGGCAAG GGCTAGCTACAACGA TCCTTGCC | 8306 |
| 4232 | AGGAACUU G CCAUAGGU | 3510 | ACCTATGG GGCTAGCTACAACGA AAGTTCCT | 8307 |
| 4229 | AACUUGCC A UAGGUGGA | 3511 | TCCACCTA GGCTAGCTACAACGA GGCAAGTT | 8308 |
| 4225 | UGCCAUAG G UGGAGUAC | 3512 | GTACTCCA GGCTAGCTACAACGA CTATGGCA | 8309 |
| 4220 | UAGGUGGA G UACGUGAU | 3513 | ATCACGTA GGCTAGCTACAACGA TCCACCTA | 8310 |
| 4218 | GGUGGAGU A CGUGAUGG | 3514 | CCATCACG GGCTAGCTACAACGA ACTCCACC | 8311 |
| 4216 | UGGAGUAC G UGAUGGGG | 3515 | CCCCATCA GGCTAGCTACAACGA GTACTCCA | 8312 |
| 4213 | AGUACGUG A UGGGGGCG | 3516 | CGCCCCCA GGCTAGCTACAACGA CACGTACT | 8313 |
| 4207 | UGAUGGGG G CGCCCGUG | 3517 | CACGGGCG GGCTAGCTACAACGA CCCCATCA | 8314 |
| 4205 | AUGGGGGC G CCCGUGGU | 3518 | ACCACGGG GGCTAGCTACAACGA GCCCCCAT | 8315 |
| 4201 | GGGCGCCC G UGGUGAUG | 3519 | CATCACCA GGCTAGCTACAACGA GGGCGCCC | 8316 |
| 4198 | CGCCCGUG G UGAUGGUC | 3520 | GACCATCA GGCTAGCTACAACGA CACGGGCG | 8317 |
| 4195 | CCGUGGUG A UGGUCCUU | 3521 | AAGGACCA GGCTAGCTACAACGA CACCACGG | 8318 |
| 4192 | UGGUGAUG G UCCUUACC | 3522 | GGTAAGGA GGCTAGCTACAACGA CATCACCA | 8319 |
| 4186 | UGGUCCUU A CCCCAGUU | 3523 | AACTGGGG GGCTAGCTACAACGA AAGGACCA | 8320 |
| 4180 | UUACCCCA G UUCUGAUG | 3524 | CATCAGAA GGCTAGCTACAACGA TGGGGTAA | 8321 |
| 4174 | CAGUUCUG A UGUUAGGA | 3525 | TCCTAACA GGCTAGCTACAACGA CAGAACTG | 8322 |
| 4172 | GUUCUGAU G UUAGGAUC | 3526 | GATCCTAA GGCTAGCTACAACGA ATCAGAAC | 8323 |
| 4166 | AUGUUAGG A UCGACACC | 3527 | GGTGTCGA GGCTAGCTACAACGA CCTAACAT | 8324 |
| 4162 | UAGGAUCG A CACCGUGU | 3528 | ACACGGTG GGCTAGCTACAACGA CGATCCTA | 8325 |
| 4160 | GGAUCGAC A CCGUGUGC | 3529 | GCACACGG GGCTAGCTACAACGA TGCGATCC | 8326 |
| 4157 | UCGACACC G UGUGCCUU | 3530 | AAGGCACA GGCTAGCTACAACGA GGTGTCGA | 8327 |
| 4155 | GACACCGU G UGCCUUAG | 3531 | CTAAGGCA GGCTAGCTACAACGA ACGGTGTC | 8328 |
| 4253 | CACCGUGU G CCUUAGAC | 3532 | GTCTAAGG GGCTAGCTACAACGA ACACGGTG | 8329 |
| 4246 | UGCCUUAG A CAUAUACG | 3533 | CGTATATG GGCTAGCTACAACGA CTAAGGCA | 8330 |
| 4144 | CCUUAGAC A UAUACGCC | 3534 | GGCGTATA GGCTAGCTACAACGA GTCTAAGG | 8331 |
| 4142 | UUAGACAU A UACGCCCC | 3535 | GGGGCGTA GGCTAGCTACAACGA ATGTCTAA | 8332 |
| 4140 | AGACAUAU A CGCCCCAA | 3536 | TTGGGGCG GGCTAGCTACAACGA ATATGTCT | 8333 |
| 4138 | ACAUAUAC G CCCCAAAC | 3537 | GTTTGGGG GGCTAGCTACAACGA GTATATGT | 8334 |
| 4131 | CGCCCCAA A CCCUAAGG | 3538 | CCTTAGGG GGCTAGCTACAACGA TTGGGGCG | 8335 |
| 4123 | ACCCUAAG G UGGCGGUA | 3539 | TACCGCCA GGCTAGCTACAACGA CTTAGGGT | 8336 |
| 4120 | CUAAGGUG G CGGUAACG | 3540 | CGTTACCG GGCTAGCTACAACGA CACCTTAG | 8337 |
| 4117 | AGGUGGCG G UAACGGAC | 3541 | GTCCGTTA GGCTAGCTACAACGA CGCCACCT | 8338 |
| 4114 | UGGCGGUA A CGGACGGA | 3542 | TCCGTCCG GGCTAGCTACAACGA TACCGCCA | 8339 |
| 4110 | GGUAACGG A CGGAUUUA | 3543 | TAAATCCG GGCTAGCTACAACGA CCGTTACC | 8340 |
| 4106 | ACGGACGG A UUUAGGAC | 3544 | GTCCTAAA GGCTAGCTACAACGA CCGTCCGT | 8341 |
| 4099 | GAUUUAGG A CGAGCACU | 3545 | AGTGCTCG GGCTAGCTACAACGA CCTAAATC | 8342 |
| 4095 | UAGGACGA G CACUUUGU | 3546 | ACAAAGTG GGCTAGCTACAACGA TCGTCCTA | 8343 |
| 4093 | GGACGAGC A CUUUGUAC | 3547 | GTACAAAG GGCTAGCTACAACGA GCTCGTCC | 8344 |
| 4088 | AGCACUUU G UACCCUUG | 3548 | CAAGGGTA GGCTAGCTACAACGA AAAGTGCT | 8345 |
| 4086 | CACUUUGU A CCCUUGGG | 3549 | CCCAAGGG GGCTAGCTACAACGA ACAAAGTG | 8346 |
| 4078 | ACCCUUGG G CUGCAUAU | 3550 | ATATGCAG GGCTAGCTACAACGA CCAAGGGT | 8347 |
| 4075 | CUUGGGCU G CAUAUGCA | 3551 | TGCATATG GGCTAGCTACAACGA AGCCCAAG | 8348 |
| 4073 | UGGGCUGC A UAUGCAGC | 3552 | GCTGCATA GGCTAGCTACAACGA GCAGCCCA | 8349 |
| 4071 | GGCUGCAU A UGCAGCCG | 3553 | CGGCTGCA GGCTAGCTACAACGA ATGCAGCC | 8350 |
| 4069 | CUGCAUAU G CAGCCGGU | 3554 | ACCGGCTG GGCTAGCTACAACGA ATATGCAG | 8351 |
| 4066 | CAUAUGCA G CCGGUACC | 3555 | GGTACCGG GGCTAGCTACAACGA TGCATATG | 8352 |
| 4062 | UGCAGCCG G UACCUUAG | 3556 | CTAAGGTA GGCTAGCTACAACGA CGGCTGCA | 8353 |
| 4060 | CAGCCGGU A CCUUAGUG | 3557 | CACTAAGG GGCTAGCTACAACGA ACCGGCTG | 8354 |
| 4054 | GUACCUUA G UGCUCUUG | 3558 | CAAGAGCA GGCTAGCTACAACGA TAAGGTAC | 8355 |
| 4052 | ACCUUAGU G CUCUUGCC | 3559 | GGCAAGAG GGCTAGCTACAACGA ACTAAGGT | 8356 |
| 4046 | GUGCUCUU G CCGCUGCC | 3560 | GGCAGCGG GGCTAGCTACAACGA AAGAGCAC | 8357 |
| 4043 | CUCUUGCC G CUGCCAGU | 3561 | ACTGGCAG GGCTAGCTACAACGA GGCAAGAG | 8358 |
| 4040 | UUGCCGCU G CCAGUGGG | 3562 | CCCACTGG GGCTAGCTACAACGA AGCGGCAA | 8359 |
| 4036 | CGCUGCCA G UGGGAGCG | 3563 | CGCTCCCA GGCTAGCTACAACGA TGGCAGCG | 8360 |
| 4030 | CAGUGGGA G CGUGUAGG | 3564 | CCTACACG GGCTAGCTACAACGA TCCCACTG | 8361 |
| 4028 | GUGGGAGC G UGUAGGUG | 3565 | CACCTACA GGCTAGCTACAACGA GCTCCCAC | 8362 |
| 4026 | GGGAGCGU G UAGGUGGG | 3566 | CCCACCTA GGCTAGCTACAACGA ACGCTCCC | 8363 |
| 4022 | GCGUGUAG G UGGGCCAC | 3567 | GTGGCCCA GGCTAGCTACAACGA CTACACGC | 8364 |
| 4018 | GUAGGUGG G CCACUUGG | 3568 | CCAAGTGG GGCTAGCTACAACGA CCACCTAC | 8365 |
| 4015 | GGUGGGCC A CUUGGAAU | 3569 | ATTCCAAG GGCTAGCTACAACGA GGCCCACC | 8366 |
| 4008 | CACUUGGA A UGUCUGCG | 3570 | CGCAGACA GGCTAGCTACAACGA TCCAAGTG | 8367 |
| 4006 | CUUGGAAU G UCUGCGGU | 3571 | ACCGCAGA GGCTAGCTACAACGA ATTCCAAG | 8368 |
| 4002 | GAAUGUCU G CGGUACGG | 3572 | CCGTACCG GGCTAGCTACAACGA AGACATTC | 8369 |
| 3999 | UGUCUGCG G UACGGCUG | 3573 | CAGCCGTA GGCTAGCTACAACGA CGCAGACA | 8370 |
| 3997 | UCUGCGGU A CGGCUGGG | 3574 | CCCAGCCG GGCTAGCTACAACGA ACCGCAGA | 8371 |
| 3994 | GCGGUACG G CUGGGGGG | 3575 | CCCCCCAG GGCTAGCTACAACGA CGTACCGC | 8372 |
| 3984 | UGGGGGGG A CGAGUUGU | 3576 | ACAACTCG GGCTAGCTACAACGA CCCCCCCA | 8373 |
| 3980 | GGGGACGA G UUGUCCGU | 3577 | ACGGACAA GGCTAGCTACAACGA TCGTCCCC | 8374 |
| 3977 | GACGAGUU G UCCGUGAA | 3578 | TTCACGGA GGCTAGCTACAACGA AACTCGTC | 8375 |
| 3973 | AGUUGUCC G UGAAGACC | 3579 | GGTCTTCA GGCTAGCTACAACGA GGACAACT | 8376 |
| 3967 | CCGUGAAG A CCGGGGAC | 3580 | GTCCCCGG GGCTAGCTACAACGA CTTCACGG | 8377 |
| 3960 | GACCGGGG A CCGCAUGG | 3581 | CCATGCGG GGCTAGCTACAACGA CCCCGGTC | 8378 |
| 3957 | CGGGGACC G CAUGGUAG | 3582 | CTACCATG GGCTAGCTACAACGA GGTCCCCG | 8379 |
| 3955 | GGGACCGC A UGGUAGUU | 3583 | AACTACCA GGCTAGCTACAACGA GCGGTCCC | 8380 |
| 3952 | ACCGCAUG G UAGUUUCC | 3584 | GGAAACTA GGCTAGCTACAACGA CATGCGGT | 8381 |
| 3949 | GCAUGGUA G UUUCCAUA | 3585 | TATGGAAA GGCTAGCTACAACGA TACCATGC | 8382 |
| 3943 | UAGUUUCC A UAGACUCA | 3586 | TGAGTCTA GGCTAGCTACAACGA GGAAACTA | 8383 |
| 3939 | UUCCAUAG A CUCAACGG | 3587 | CCGTTGAG GGCTAGCTACAACGA CTATGGAA | 8384 |
| 3934 | UAGACUCA A CGGGUACA | 3588 | TGTACCCG GGCTAGCTACAACGA TGAGTCTA | 8385 |
| 3930 | CUCAACGG G UACAAAGU | 3589 | ACTTTGTA GGCTAGCTACAACGA CCGTTGAG | 8386 |
| 3928 | CAACGGGU A CAAAGUCC | 3590 | GGACTTTG GGCTAGCTACAACGA ACCCGTTG | 8387 |
| 3923 | GGUACAAA G UCCACCGC | 3591 | GCGGTGGA GGCTAGCTACAACGA TTTGTACC | 8388 |
| 3919 | CAAAGUCC A CCGCCUUC | 3592 | GAAGGCGG GGCTAGCTACAACGA GGACTTTG | 8389 |
| 3916 | AGUCCACC G CCUUCGCA | 3593 | TGCGAAGG GGCTAGCTACAACGA GGTGGACT | 8390 |
| 3910 | CCGCCUUC G CAACCCCC | 3594 | GGGGGTTG GGCTAGCTACAACGA GAAGGCGG | 8391 |
| 3907 | CCUUCGCA A CCCCCCGG | 3595 | CCGGGGGG GGCTAGCTACAACGA TGCGAAGG | 8392 |
| 3898 | CCCCCCGG G UGCACACA | 3596 | TGTGTGCA GGCTAGCTACAACGA CCGGGGGG | 8393 |
| 3896 | CCCCGGGU G CACACAGC | 3597 | GCTGTGTG GGCTAGCTACAACGA ACCCGGGG | 8394 |
| 3894 | CCGGGUGC A CACAGCAG | 3598 | CTGCTGTG GGCTAGCTACAACGA GCACCCGG | 8395 |
| 3892 | GGGUGCAC A CAGCAGCC | 3599 | GGCTGCTG GGCTAGCTACAACGA GTGCACCC | 8396 |
| 3889 | UGCACACA G CAGCCCGG | 3600 | CCGGGCTG GGCTAGCTACAACGA TGTGTGCA | 8397 |
| 3886 | ACACAGCA G CCCGGAAG | 3601 | CTTCCGGG GGCTAGCTACAACGA TGCTGTGT | 8398 |
| 3877 | CCCGGAAG A UGCCCACA | 3602 | TGTGGGCA GGCTAGCTACAACGA CTTCCGGG | 8399 |
| 3875 | CGGAAGAU G CCCACAAC | 3603 | GTTGTGGG GGCTAGCTACAACGA ATCTTCCG | 8400 |
| 3871 | AGAUGCCC A CAACGUGC | 3604 | GCACGTTG GGCTAGCTACAACGA GGGCATCT | 8401 |
| 3868 | UGCCCACA A CGUGCCCC | 3605 | GGGGCACG GGCTAGCTACAACGA TGTGGGCA | 8402 |
| 3866 | CCCACAAC G UGCCCCGA | 3606 | TCGGGGCA GGCTAGCTACAACGA GTTGTGGG | 8403 |
| 3864 | CACAACGU G CCCCGAAG | 3607 | CTTCGGGG GGCTAGCTACAACGA ACGTTGTG | 8404 |
| 3854 | CCCGAAGG G CAGAGCAG | 3608 | CTGCTCTG GGCTAGCTACAACGA CCTTCGGG | 8405 |
| 3849 | AGGGCAGA G CAGUGGAC | 3609 | GTCCACTG GGCTAGCTACAACGA TCTGCCCT | 8406 |
| 3846 | GCAGAGCA G UGGACCGC | 3610 | GCGGTCCA GGCTAGCTACAACGA TGCTCTGC | 8407 |
| 3842 | AGCAGUGG A CCGCCCGA | 3611 | TCGGGCGG GGCTAGCTACAACGA CCACTGCT | 8408 |
| 3839 | AGUGGACC G CCCGAGGA | 3612 | TCCTCGGG GGCTAGCTACAACGA GGTCCACT | 8409 |
| 3830 | CCCGAGGA G CCCUUCAA | 3613 | TTGAAGGG GGCTAGCTACAACGA TCCTCGGG | 8410 |
| 3821 | CCCUUCAA G UAGGAGAU | 3614 | ATCTCCTA GGCTAGCTACAACGA TTGAAGGG | 8411 |
| 3814 | AGUAGGAG A UGGGCCUG | 3615 | CAGGCCCA GGCTAGCTACAACGA CTCCTACT | 8412 |
| 3810 | GGAGAUGG G CCUGGGGG | 3616 | CCCCCAGG GGCTAGCTACAACGA CCATCTCC | 8413 |
| 3801 | CCUGGGGG A UAGUAAGC | 3617 | GCTTACTA GGCTAGCTACAACGA CCCCCAGG | 8414 |
| 3798 | GGGGGAUA G UAAGCUCC | 3618 | GGAGCTTA GGCTAGCTACAACGA TATCCCCC | 8415 |
| 3794 | GAUAGUAA G CUCCCCCU | 3619 | AGGGGGAG GGCTAGCTACAACGA TTACTATC | 8416 |
| 3785 | CUCCCCCU G CUGUCACC | 3620 | GGTGACAG GGCTAGCTACAACGA AGGGGGAG | 8417 |
| 3782 | CCCCUGCU G UCACCCCG | 3621 | CGGGGTGA GGCTAGCTACAACGA AGCAGGGG | 8418 |
| 3779 | CUGCUGUC A CCCCGCCG | 3622 | CGGCGGGG GGCTAGCTACAACGA GACAGCAG | 8419 |
| 3774 | GUCACCCC G CCGGCGCA | 3623 | TGCGCCGG GGCTAGCTACAACGA GGGGTGAC | 8420 |
| 3770 | CCCCGCCG G CGCACCGG | 3624 | CCGGTGCG GGCTAGCTACAACGA CGGCGGGG | 8421 |
| 3768 | CCGCCGGC G CACCGGAA | 3625 | TTCCGGTG GGCTAGCTACAACGA GCCGGCGG | 8422 |
| 3766 | GCCGGCGC A CCGGAAUG | 3626 | CATTCCGG GGCTAGCTACAACGA GCGCCGGC | 8423 |
| 3760 | GCACCGGA A UGACAUCA | 3627 | TGATGTCA GGCTAGCTACAACGA TCCGGTGC | 8424 |
| 3757 | CCGGAAUG A CAUCAGCG | 3628 | CGCTGATG GGCTAGCTACAACGA CATTCCGG | 8425 |
| 3755 | GGAAUGAC A UCAGCGUG | 3629 | CACGCTGA GGCTAGCTACAACGA GTCATTCC | 8426 |
| 3751 | UGACAUCA G CGUGUCUC | 3630 | GAGACACG GGCTAGCTACAACGA TGATGTCA | 8427 |
| 3749 | ACAUCAGC G UGUCUCGU | 3631 | ACGAGACA GGCTAGCTACAACGA GCTGATGT | 8428 |
| 3747 | AUCAGCGU G UCUCGUGA | 3632 | TCACGAGA GGCTAGCTACAACGA ACGCTGAT | 8429 |
| 3742 | CGUGUCUC G UGACCAAG | 3633 | CTTGGTCA GGCTAGCTACAACGA GAGACACG | 8430 |
| 3739 | GUCUCGUG A CCAAGUAA | 3634 | TTACTTGG GGCTAGCTACAACGA CACGAGAC | 8431 |
| 3734 | GUGACCAA G UAAAGGUC | 3635 | GACCTTTA GGCTAGCTACAACGA TTGGTCAC | 8432 |
| 3728 | AAGUAAAG G UCCGAGCC | 3636 | GGCTCGGA GGCTAGCTACAACGA CTTTACTT | 8433 |
| 3722 | AGGUCCGA G CCGCCGCA | 3637 | TGCGGCGG GGCTAGCTACAACGA TCGGACCT | 8434 |
| 3719 | UCCGAGCC G CCGCAGGU | 3638 | ACCTGCGG GGCTAGCTACAACGA GGCTCGGA | 8435 |
| 3716 | GAGCCGCC G CAGGUGCA | 3639 | TGCACCTG GGCTAGCTACAACGA GGCGGCTC | 8436 |
| 3712 | CGCCGCAG G UGCAUGGU | 3640 | ACCATGCA GGCTAGCTACAACGA CTGCGGCG | 8437 |
| 3710 | CCGCAGGU G CAUGGUGU | 3641 | ACACCATG GGCTAGCTACAACGA ACCTGCGG | 8438 |
| 3708 | GCAGGUGC A UGGUGUCA | 3642 | TGACACCA GGCTAGCTACAACGA GCACCTGC | 8439 |
| 3705 | UGCAUGGU G UCAAGGAC | 3643 | CCTTGACA GGCTAGCTACAACGA CATGCACC | 8440 |
| 3703 | UGCAUGGU G UCAAGGAC | 3644 | GTCCTTGA GGCTAGCTACAACGA ACCATGCA | 8441 |
| 3696 | UGUCAAGG A CCGCGCUC | 3645 | GAGCGCGG GGCTAGCTACAACGA CCTTGACA | 8442 |
| 3693 | CAAGGACC G CGCUCCGG | 3646 | CCGGAGCG GGCTAGCTACAACGA GGTCCTTG | 8443 |
| 3691 | AGGACCGC G CUCCGGGG | 3647 | CCCCGGAG GGCTAGCTACAACGA GCGGTCCT | 8444 |
| 3681 | UCCGGGGG G CGCCGGCC | 3648 | GGCCGGCG GGCTAGCTACAACGA CCCCCGGA | 8445 |
| 3679 | CGGGGGGC G CCGGCCAU | 3649 | ATGGCCGG GGCTAGCTACAACGA GCCCCCCG | 8446 |
| 3675 | GGGCGCCG G CCAUCCGA | 3650 | TCGGATGG GGCTAGCTACAACGA CGGCGCCC | 8447 |
| 3672 | CGCCGGCC A UCCGACGA | 3651 | TCGTCGGA GGCTAGCTACAACGA GGCCGGCG | 8448 |
| 3667 | GCCAUCCG A CGAGGUCC | 3652 | GGACCTCG GGCTAGCTACAACGA CGGATGGC | 8449 |
| 3662 | CCGACGAG G UCCUGGUC | 3653 | GACCAGGA GGCTAGCTACAACGA CTCGTCGG | 8450 |
| 3656 | AGGUCCUG G UCUACAUU | 3654 | AATGTAGA GGCTAGCTACAACGA CAGGACCT | 8451 |
| 3652 | CCUGGUCU A CAUUGGUG | 3655 | CACCAATG GGCTAGCTACAACGA AGACCAGG | 8452 |
| 3650 | UGGUCUAC A UUGGUGUA | 3656 | TACACCAA GGCTAGCTACAACGA GTAGACCA | 8453 |
| 3646 | CUACAUUG G UGUACAUU | 3657 | AATGTACA GGCTAGCTACAACGA CAATGTAG | 8454 |
| 3644 | ACAUUGGU G UACAUUUG | 3658 | CAAATGTA GGCTAGCTACAACGA ACCAATGT | 8455 |
| 3642 | AUUGGUGU A CAUUUGGG | 3659 | CCCAAATG GGCTAGCTACAACGA ACACCAAT | 8456 |
| 3640 | UGGUGUAC A UUUGGGUG | 3660 | CACCCAAA GGCTAGCTACAACGA GTACACCA | 8457 |
| 3634 | ACAUUUGG G UGAUUGGA | 3661 | TCCAATCA GGCTAGCTACAACGA CCAAATGT | 8458 |
| 3631 | UUUGGGUG A UUGGACCC | 3662 | GGGTCCAA GGCTAGCTACAACGA CACCCAAA | 8459 |
| 3626 | GUGAUUGG A CCCUUUGG | 3663 | CCAAAGGG GGCTAGCTACAACGA CCAATCAC | 8460 |
| 3617 | CCCUUUGG G CCGGCUAG | 3664 | CTAGCCGG GGCTAGCTACAACGA CCAAAGGG | 8461 |
| 3613 | UUGGGCCG G CUAGGGUC | 3665 | GACCCTAG GGCTAGCTACAACGA CGGCCCAA | 8462 |
| 3607 | CGGCUAGG G UCUUUGAG | 3666 | CTCAAAGA GGCTAGCTACAACGA CCTAGCCG | 8463 |
| 3599 | GUCUUUGA G CCGGCGCC | 3667 | GGCGCCGG GGCTAGCTACAACGA TCAAAGAC | 8464 |
| 3595 | UUGAGCCG G CGCCGUGG | 3668 | CCACGGCG GGCTAGCTACAACGA CGGCTCAA | 8465 |
| 3593 | GAGCCGGC G CCGUGGUA | 3669 | TACCACGG GGCTAGCTACAACGA GCCGGCTC | 8466 |
| 3590 | CCGGCGCC G UGGUAGAC | 3670 | GTCTACCA GGCTAGCTACAACGA GGCGCCGG | 8467 |
| 3587 | GCGCCGUG G UAGACAGU | 3671 | ACTGTCTA GGCTAGCTACAACGA CACGGCGC | 8468 |
| 3583 | CGUGGUAG A CAGUCCAG | 3672 | CTGGACTG GGCTAGCTACAACGA CTACCACG | 8469 |
| 3580 | GGUAGACA G UCCAGCAC | 3673 | GTGCTGGA GGCTAGCTACAACGA TGTCTACC | 8470 |
| 3575 | ACAGUCCA G CACACGCC | 3674 | GGCGTGTG GGCTAGCTACAACGA TGGACTGT | 8471 |
| 3573 | AGUCCAGC A CACGCCGU | 3675 | ACGGCGTG GGCTAGCTACAACGA GCTGGACT | 8472 |
| 3571 | UCCAGCAC A CGCCGUUG | 3676 | CAACGGCG GGCTAGCTACAACGA GTGCTGGA | 8473 |
| 3569 | CAGCACAC G CCGUUGAC | 3677 | GTCAACGG GGCTAGCTACAACGA GTGTGCTG | 8474 |
| 3566 | CACACGCC G UUGACGCA | 3678 | TGCGTCAA GGCTAGCTACAACGA GGCGTGTG | 8475 |
| 3562 | CGCCGUUG A CGCAGGUC | 3679 | GACCTGCG GGCTAGCTACAACGA CAACGGCG | 8476 |
| 3560 | CCGUUGAC G CAGGUCGC | 3680 | GCGACCTG GGCTAGCTACAACGA GTCAACGG | 8477 |
| 3556 | UGACGCAG G UCGCUAGG | 3681 | CCTAGCGA GGCTAGCTACAACGA CTGCGTCA | 8478 |
| 3553 | CGCAGGUC G CUAGGAAA | 3682 | TTTCCTAG GGCTAGCTACAACGA GACCTGCG | 8479 |
| 3543 | UAGGAAAG A CUGCGUCG | 3683 | CGACGCAG GGCTAGCTACAACGA CTTTCCTA | 8480 |
| 3540 | GAAAGACU G CGUCGCGG | 3684 | CCGCGACG GGCTAGCTACAACGA AGTCTTTC | 8481 |
| 3538 | AAGACUGC G UCGCGGUG | 3685 | CACCGCGA GGCTAGCTACAACGA GCAGTCTT | 8482 |
| 3535 | ACUGCGUC G CGGUGGAA | 3686 | TTCCACCG GGCTAGCTACAACGA GACGCAGT | 8483 |
| 3532 | GCGUCGCG G UGGAAACC | 3687 | GGTTTCCA GGCTAGCTACAACGA CGCGACGC | 8484 |
| 3526 | CGGUGGAA A CCACUUGA | 3688 | TCAAGTGG GGCTAGCTACAACGA TTCCACCG | 8485 |
| 3523 | UGGAAACC A CUUGAACU | 3689 | AGTTCAAG GGCTAGCTACAACGA GGTTTCCA | 8486 |
| 3517 | CCACUUGA A CUUCCCCC | 3690 | GGGGGAAG GGCTAGCTACAACGA TCAAGTGG | 8487 |
| 3505 | CCCCCUCG A CUUGGUUC | 3691 | GAACCAAG GGCTAGCTACAACGA CGAGGGGG | 8488 |
| 3500 | UCGACUUG G UUCUUGUC | 3692 | GACAAGAA GGCTAGCTACAACGA CAAGTCGA | 8489 |
| 3494 | UGGUUCUU G UCCCGGCC | 3693 | GGCCGGGA GGCTAGCTACAACGA AAGAACCA | 8490 |
| 3488 | UUGUCCCG G CCCGUGAG | 3694 | CTCACGGG GGCTAGCTACAACGA CGGGACAA | 8491 |
| 3484 | CCCGGCCC G UGAGGCUG | 3695 | CAGCCTCA GGCTAGCTACAACGA GGGCCGGG | 8492 |
| 3479 | CCCGUGAG G CUGGUGAU | 3696 | ATCACCAG GGCTAGCTACAACGA CTCACGGG | 8493 |
| 3475 | UGAGGCUG G UGAUAAUG | 3697 | CATTATCA GGCTAGCTACAACGA CAGCCTCA | 8494 |
| 3472 | GGCUGGUG A UAAUGCAG | 3698 | CTGCATTA GGCTAGCTACAACGA CACCAGCC | 8495 |
| 3469 | UGGUGAUA A UGCAGCCA | 3699 | TGGCTGCA GGCTAGCTACAACGA TATCACCA | 8496 |
| 3467 | GUGAUAAU G CAGCCAAA | 3700 | TTTGGCTG GGCTAGCTACAACGA ATTATCAC | 8497 |
| 3464 | AUAAUGCA G CCAAACAG | 3701 | CTGTTTGG GGCTAGCTACAACGA TGCATTAT | 8498 |
| 3459 | GCAGCCAA A CAGGCCCC | 3702 | GGGGCCTG GGCTAGCTACAACGA TTGGCTGC | 8499 |
| 3455 | CCAAACAG G CCCCGCGU | 3703 | ACGCGGGG GGCTAGCTACAACGA CTGTTTGG | 8500 |
| 3450 | CAGGCCCC G CGUCUGUU | 3704 | AACAGACG GGCTAGCTACAACGA GGGGCCTG | 8501 |
| 3448 | GGCCCCGC G UCUGUUGG | 3705 | CCAACAGA GGCTAGCTACAACGA GCGGGGCC | 8502 |
| 3444 | CCGCGUCU G UUGGGAGU | 3706 | ACTCCCAA GGCTAGCTACAACGA AGACGCGG | 8503 |
| 3437 | UGUUGGGA G UAGGCCGU | 3707 | ACGGCCTA GGCTAGCTACAACGA TCCCAACA | 8504 |
| 3433 | GGGAGUAG G CCGUAAUG | 3708 | CATTACGG GGCTAGCTACAACGA CTACTCCC | 8505 |
| 3430 | AGUAGGCC G UAAUGGGC | 3709 | GCCCATTA GGCTAGCTACAACGA GGCCTACT | 8508 |
| 3427 | AGGCCGUA A UGGGCGCG | 3710 | CGCGCCCA GGCTAGCTACAACGA TACGGCCT | 8507 |
| 3423 | CGUAAUGG G CGCGAGGA | 3711 | TCCTCGCG GGCTAGCTACAACGA CCATTACG | 8508 |
| 3421 | UAAUGGGC G CGAGGAGU | 3712 | ACTCCTCG GGCTAGCTACAACGA GCCCATTA | 8509 |
| 3414 | CGCGAGGA G UCGCCACC | 3713 | GGTGGCGA GGCTAGCTACAACGA TCCTCGCG | 8510 |
| 3411 | GAGGAGUC G CCACCCCU | 3714 | AGGGGTGG GGCTAGCTACAACGA GACTCCTC | 8511 |
| 3408 | GAGUCGCC A CCCCUGCC | 3715 | GGCAGGGG GGCTAGCTACAACGA GGCGACTC | 8512 |
| 3402 | CCACCCCU G CCCCUCAA | 3716 | TTGAGGGG GGCTAGCTACAACGA AGGGGTGG | 8513 |
| 3392 | CCCUCAAG A CUGUCGGC | 3717 | GCCGACAG GGCTAGCTACAACGA CTTGAGGG | 8514 |
| 3389 | UCAAGACU G UCGGCUGG | 3718 | CCAGCCGA GGCTAGCTACAACGA AGTCTTGA | 8515 |
| 3385 | GACUGUCG G CUGGUCCU | 3719 | AGGACCAG GGCTAGCTACAACGA CGACAGTC | 8516 |
| 3381 | GUCGGCUG G UCCUAGGA | 3720 | TCCTAGGA GGCTAGCTACAACGA CAGCCGAC | 8517 |
| 3372 | UCCUAGGA G UAUCUCCC | 3721 | GGGAGATA GGCTAGCTACAACGA TCCTAGGA | 8518 |
| 3370 | CUAGGAGU A UCUCCCUC | 3722 | GAGGGAGA GGCTAGCTACAACGA ACTCCTAG | 8519 |
| 3352 | CCCUUCGG G CGGAGACA | 3723 | TGTCTCCG GGCTAGCTACAACGA CCGAAGGG | 8520 |
| 3346 | GGGCGGAG A CAGGUAGA | 3724 | TCTACCTG GGCTAGCTACAACGA CTCCGCCC | 8521 |
| 3342 | GGAGACAG G UAGACCCA | 3725 | TGGGTCTA GGCTAGCTACAACGA CTGTCTCC | 8522 |
| 3338 | CCAUAAUG A UGUCCCCA | 3728 | GGACATCA GGCTAGCTACAACGA TATGGGTC | 8523 |
| 3334 | GUAGACCC A UAAUGAUG | 3727 | CATCATTA GGCTAGCTACAACGA GGGTCTAC | 8524 |
| 3331 | GACCCAUA A UGAUGUCC | 3728 | GGACATCA GGCTAGCTACAACGA TATGGGTC | 8525 |
| 3328 | CCAUAAUG A UGUCCCCA | 3729 | TGGGGACA GGCTAGCTACAACGA CATTATGG | 8526 |
| 3326 | AUAAUGAU G UCCCCACA | 3730 | TGTGGGGA GGCTAGCTACAACGA ATCATTAT | 8527 |
| 3320 | AUGUCCCC A CACGCCGC | 3731 | GCGGCGTG GGCTAGCTACAACGA GGGGACAT | 8528 |
| 3318 | GUCCCCAC A CGCCGCGG | 3732 | CCGCGGCG GGCTAGCTACAACGA GTGGGGAC | 8529 |
| 3316 | CCCCACAC G CCGCGGUG | 3733 | CACCGCGG GGCTAGCTACAACGA GTGTGGGG | 8530 |
| 3313 | CACACGCC G CGGUGUCU | 3734 | AGACACCG GGCTAGCTACAACGA GGCGTGTG | 8531 |
| 3310 | ACGCCGCG G UGUCUCCC | 3735 | GGGAGACA GGCTAGCTACAACGA CGCGGCGT | 8532 |
| 3308 | GCCGCGGU G UCUCCCCC | 3736 | GATCATCA GGCTAGCTACAACGA CTGGGGGG | 8533 |
| 3295 | CCCCCCAG G UGAUGAUC | 3737 | GATCATCA GGCTAGCTACAACGA CTGGGGGG | 8534 |
| 3292 | CCCAGGUG A UGAUCUUG | 3738 | CAAGATCA GGCTAGCTACAACGA CACCTGGG | 8535 |
| 3289 | AGGUGAUG A UCUUGAUU | 3739 | AATCAAGA GGCTAGCTACAACGA CATCACCT | 8536 |
| 3283 | UGAUCUUG A UUUCCAUG | 3740 | CATGGAAA GGCTAGCTACAACGA CAAGATCA | 8537 |
| 3277 | UGAUUUCC A UGUCGGAG | 3741 | CTCCGACA GGCTAGCTACAACGA GGAAATCA | 8538 |
| 3275 | AUUUCCAU G UCGGAGAA | 3742 | TTCTCCGA GGCTAGCTACAACGA ATGGAAAT | 8539 |
| 3265 | CGGAGAAG A CGACGGGC | 3743 | GCCCGTCG GGCTAGCTACAACGA CTTCTCCG | 8540 |
| 3262 | AGAAGACG A CGGGCUCG | 3744 | CGAGCCCG GGCTAGCTACAACGA CGTCTTCT | 8541 |
| 3258 | GACGACGG G CUCGACCG | 3745 | CGGTCGAG GGCTAGCTACAACGA CCGTCGTC | 8542 |
| 3253 | CGGGCUCG A CCGCUACC | 3746 | GGTAGCGG GGCTAGCTACAACGA CGAGCCCG | 8543 |
| 3250 | GCUCGACC G CUACCGCC | 3747 | GGCGGTAG GGCTAGCTACAACGA GGTCGAGC | 8544 |
| 3247 | CGACCGCU A CCGCCAGG | 3748 | CCTGGCGG GGCTAGCTACAACGA AGCGGTCG | 8545 |
| 3244 | CCGCUACC G CCAGGUCU | 3749 | AGACCTGG GGCTAGCTACAACGA GGTAGCCG | 8546 |
| 3239 | ACCGCCAG G UCUCGUAG | 3750 | CTACGAGA GGCTAGCTACAACGA CTGGCGGT | 8547 |
| 3234 | CAGGUCUC G UAGACCUG | 3751 | CAGGTCTA GGCTAGCTACAACGA CAGACCTG | 8548 |
| 3230 | UCUCGUAG A CCUGUGUG | 3752 | CACACAGG GGCTAGCTACAACGA CTACGAGA | 8549 |
| 3226 | GUAGACCU G UGUGGGCC | 3753 | GGCCCACA GGCTAGCTACAACGA AGGTCTAC | 8550 |
| 3224 | AGACCUGU G UGGGCCCA | 3754 | TGGGCCCA GGCTAGCTACAACGA ACAGGTCT | 8551 |
| 3220 | CUGUGUGG G CCCAGUCC | 3755 | GGACTGGG GGCTAGCTACAACGA CCACACAG | 8552 |
| 3215 | UGGGCCCA G UCCUGCAG | 3756 | CTGCAGGA GGCTAGCTACAACGA TGGGCCCA | 8553 |
| 3210 | CCAGUCCU G CAGUGGAG | 3757 | CTCCACTG GGCTAGCTACAACGA AGGACTGG | 8554 |
| 3207 | GUCCUGCA G UGGAGUGA | 3758 | TCACTCCA GGCTAGCTACAACGA TGCAGGAC | 8555 |
| 3202 | GCAGUGGA G UGAGGUGG | 3759 | CCACCTCA GGCTAGCTACAACGA TCCACTGC | 8556 |
| 3197 | GGAGUGAG G UGGUCAUA | 3760 | TATGACCA GGCTAGCTACAACGA CTCACTCC | 8557 |
| 3194 | GUGAGGUG G UCAUAGAC | 3761 | GTCTATGA GGCTAGCTACAACGA CACCTCAC | 8558 |
| 3191 | AGGUGGUC A UAGACGGA | 3762 | TCCGTCTA GGCTAGCTACAACGA GACCACCT | 8559 |
| 3187 | GGUCAUAG A CGGACGUA | 3763 | TACGTCCG GGCTAGCTACAACGA CTATGACC | 8560 |
| 3183 | AUAGACGG A CGUACCUU | 3764 | AAGGTACG GGCTAGCTACAACGA CCGTCTAT | 8561 |
| 3181 | AGACGGAC G UACCUUUC | 3765 | GAAAGGTA GGCTAGCTACAACGA GTCCGTCT | 8562 |
| 3179 | ACGGACGU A CCUUUCAA | 3766 | TTGAAAGG GGCTAGCTACAACGA ACGTCCGT | 8563 |
| 3171 | ACCUUUCA A UUCGGCCA | 3767 | TGGCCGAA GGCTAGCTACAACGA TGAAAGGT | 8564 |
| 3166 | UCAAUUCG G CCAACUUC | 3768 | GAAGTTGG GGCTAGCTACAACGA CGAATTGA | 8565 |
| 3162 | UUCGGCCA A CUUCAUGA | 3769 | TCATGAAG GGCTAGCTACAACGA TGGCCGAA | 8566 |
| 3157 | CCAACUUC A UGAAGGCC | 3770 | GGCCTTCA GGCTAGCTACAACGA GAAGTTGG | 8567 |
| 3151 | UCAUGAAG G CCAUUUGG | 3771 | CCAAATGG GGCTAGCTACAACGA CTTCATGA | 8568 |
| 3148 | UGAAGGCC A UUUGGACA | 3772 | TGTCCAAA GGCTAGCTACAACGA GGCCTTCA | 8569 |
| 3142 | CCAUUUGG A CAUAUUGC | 3773 | GCAATATG GGCTAGCTACAACGA CCAAATGG | 8570 |
| 3140 | AUUUGGAC A UAUUGCCC | 3774 | GGGCAATA GGCTAGCTACAACGA GTCCAAAT | 8571 |
| 3138 | UUGGACAU A UUGCCCCC | 3775 | GGGGGCAA GGCTAGCTACAACGA ATGTCCAA | 8572 |
| 3135 | GACAUAUU G CCCCCCAC | 3776 | GTGGGGGG GGCTAGCTACAACGA AATATGTC | 8573 |
| 3128 | UGCCCCCC A CCGACUUU | 3777 | AAAGTCGG GGCTAGCTACAACGA GGGGGGCA | 8574 |
| 3124 | CCCCACCG A CUUUCCGC | 3778 | GCGGAAAG GGCTAGCTACAACGA CGGTGGGG | 8575 |
| 3117 | GACUUUCC G CACCAAAA | 3779 | TTTTGGTG GGCTAGCTACAACGA GGAAAGTC | 8576 |
| 3115 | CUUUCCGC A CCAAAAUG | 3780 | CATTTTGG GGCTAGCTACAACGA GCGGAAAG | 8577 |
| 3109 | GCACCAAA A UGCAUUCA | 3781 | TGAATGCA GGCTAGCTACAACGA TTTGGTGC | 8578 |
| 3107 | ACCAAAAU G CAUUCACG | 3782 | CGTGAATG GGCTAGCTACAACGA ATTTTGGT | 8579 |
| 3105 | CAAAAUGC A UUCACGGA | 3783 | TCCGTGAA GGCTAGCTACAACGA GCATTTTG | 8580 |
| 3101 | AUGCAUUC A CGGAUGAC | 3784 | GTCATCCG GGCTAGCTACAACGA GAATGCAT | 8581 |
| 3097 | AUUCACGG A UGACCCCU | 3785 | AGGGGTCA GGCTAGCTACAACGA CCGTGAAT | 8582 |
| 3094 | CACGGAUG A CCCCUUGA | 3786 | TCAAGGGG GGCTAGCTACAACGA CATCCGTG | 8583 |
| 3085 | CCCCUUGA G CCCGCACA | 3787 | TGTGCGGG GGCTAGCTACAACGA TCAAGGGG | 8584 |
| 3081 | UUGAGCCC G CACAAAGU | 3788 | ACTTTGTG GGCTAGCTACAACGA GGGCTCAA | 8585 |
| 3079 | GAGCCCGC A CAAAGUCC | 3789 | GGACTTTG GGCTAGCTACAACGA GCGGGCTC | 8586 |
| 3074 | CGCACAAA G UCCGGCAC | 3790 | GTGCCGGA GGCTAGCTACAACGA TTTGTGCG | 8587 |
| 3069 | AAAGUCCG G CACUUUUG | 3791 | CAAAAGTG GGCTAGCTACAACGA CGGACTTT | 8588 |
| 3067 | AGUCCGGC A CUUUUGCU | 3792 | AGCAAAAG GGCTAGCTACAACGA GCCGGACT | 8589 |
| 3061 | GCACUUUU G CUAUACCA | 3793 | TGGTATAG GGCTAGCTACAACGA AAAAGTGC | 8590 |
| 3058 | CUUUUGCU A UACCAGCC | 3794 | GGCTGGTA GGCTAGCTACAACGA AGCAAAAG | 8591 |
| 3056 | UUUGCUAU A CCAGCCUG | 3795 | CAGGCTGG GGCTAGCTACAACGA ATAGCAAA | 8592 |
| 3052 | CUAUACCA G CCUGGAGC | 3796 | GCTCCAGG GGCTAGCTACAACGA TGGTATAG | 8593 |
| 3045 | AGCCUGGA G CACCAUGA | 3797 | TCATGGTG GGCTAGCTACAACGA TCCAGGCT | 8594 |
| 3043 | CCUGGAGC A CCAUGAGC | 3798 | GCTCATGG GGCTAGCTACAACGA GCTCCAGG | 8595 |
| 3040 | GGAGCACC A UGAGCGGG | 3799 | CCCGCTCA GGCTAGCTACAACGA GGTGCTCC | 8596 |
| 3036 | CACCAUGA G CGGGCCGA | 3800 | TCGGCCCG GGCTAGCTACAACGA TCATGGTG | 8597 |
| 3032 | AUGAGCGG G CCGAGUAU | 3801 | ATACTCGG GGCTAGCTACAACGA CCGCTCAT | 8598 |
| 3027 | CGGGCCGA G UAUGGCGA | 3802 | TCGCCATA GGCTAGCTACAACGA TCGGCCCG | 8599 |
| 3025 | GGCCGAGU A UGGCGAGC | 3803 | GCTCGCCA GGCTAGCTACAACGA ACTCGGCC | 8600 |
| 3022 | CGAGUAUG G CGAGCAUA | 3804 | TATGCTCG GGCTAGCTACAACGA CATACTCG | 8601 |
| 3018 | UAUGGCGA G CAUAAUUU | 3805 | AAATTATG GGCTAGCTACAACGA TCGCCATA | 8602 |
| 3016 | UGGCGAGC A UAAUUUUG | 3806 | CAAAATTA GGCTAGCTACAACGA GCTCGCCA | 8603 |
| 3013 | CGAGCAUA A UUUUGGUG | 3807 | CACCAAAA GGCTAGCTACAACGA TATGCTCG | 8604 |
| 3007 | UAAUUUUG G UGAUGUCA | 3808 | TGACATCA GGCTAGCTACAACGA CAAAATTA | 8605 |
| 3004 | UUUUGGUG A UGUCAAAG | 3809 | CTTTGACA GGCTAGCTACAACGA CACCAAAA | 8606 |
| 3002 | UUGGUGAU G UCAAAGAU | 3810 | ATCTTTGA GGCTAGCTACAACGA ATCACCAA | 8607 |
| 2995 | UGUCAAAG A UUAGCUCU | 3811 | AGAGCTAA GGCTAGCTACAACGA CTTTGACA | 8608 |
| 2991 | AAAGAUUA G CUCUGGGU | 3812 | ACCCAGAG GGCTAGCTACAACGA TAATCTTT | 8609 |
| 2984 | AGCUCUGG G UGGACCAC | 3813 | GTGGTCCA GGCTAGCTACAACGA CCAGAGCT | 8610 |
| 2980 | CUGGGUGG A CCACACAC | 3814 | GTGTGTGG GGCTAGCTACAACGA CCACCCAG | 8611 |
| 2977 | GGUGGACC A CACACGUG | 3815 | CACGTGTG GGCTAGCTACAACGA GGTCCACC | 8612 |
| 2975 | UGGACCAC A CACGUGAG | 3816 | CTCACGTG GGCTAGCTACAACGA GTGGTCCA | 8613 |
| 2973 | GACCACAC A CGUGAGGA | 3817 | TCCTCACG GGCTAGCTACAACGA GTGTGGTC | 8614 |
| 2971 | CCACACAC G UGAGGAGA | 3818 | TCTCCTCA GGCTAGCTACAACGA GTGTGTGG | 8615 |
| 2962 | UGAGGAGA A UGAUGGCA | 3819 | TGCCATCA GGCTAGCTACAACGA TCTCCTCA | 8616 |
| 2959 | GGAGAAUG A UGGCACCG | 3820 | CGGTGCCA GGCTAGCTACAACGA CATTCTCC | 8617 |
| 2956 | GAAUGAUG G CACCGCGC | 3821 | GCGCGGTG GGCTAGCTACAACGA CATCATTC | 8618 |
| 2954 | AUGAUGGC A CCGCGCCC | 3822 | GGGCGCGG GGCTAGCTACAACGA GCCATCAT | 8619 |
| 2951 | AUGGCACC G CGCCCCCC | 3823 | GGGGGGCG GGCTAGCTACAACGA GGTGCCAT | 8620 |
| 2949 | GGCACCGC G CCCCCCCC | 3824 | GGGGGGGG GGCTAGCTACAACGA GCGGTGCC | 8621 |
| 2938 | CCCCCCGA A CGUUGAGG | 3825 | CCTCAACG GGCTAGCTACAACGA TCGGGGGG | 8622 |
| 2936 | CCCCGAAC G UUGAGGGG | 3826 | CCCCTCAA GGCTAGCTACAACGA GTTCGGGG | 8623 |
| 2923 | GGGGGGGG A UCCACACU | 3827 | AGTGTGGA GGCTAGCTACAACGA CCCCCCCC | 8624 |
| 2919 | GGGGAUCC A CACUUGCA | 3828 | TGCAAGTG GGCTAGCTACAACGA GGATCCCC | 8625 |
| 2917 | GGAUCCAC A CUUGCAAC | 3829 | GTTGCAAG GGCTAGCTACAACGA GTGGATCC | 8626 |
| 2913 | CCACACUU G CAACUGCG | 3830 | CGCAGTTG GGCTAGCTACAACGA AAGTGTGG | 8627 |
| 2910 | CACUUGCA A CUGCGCCU | 3831 | AGGCGCAG GGCTAGCTACAACGA TGCAAGTG | 8628 |
| 2907 | UUGCAACU G CGCCUCGG | 3832 | CCGAGGCG GGCTAGCTACAACGA AGTTGCAA | 8629 |
| 2905 | GCAACUGC G CCUCGGCU | 3833 | AGCCGAGG GGCTAGCTACAACGA CGAGGCGC | 8630 |
| 2899 | GCGCCUCG G CUCUGGUG | 3834 | CACCAGAG GGCTAGCTACAACGA CGAGGCGC | 8631 |
| 2893 | CGGCUCUG G UGAUAAGG | 3835 | CCTTATCA GGCTAGCTACAACGA CAGAGCCG | 8632 |
| 2890 | CUCUGGUG A UAAGGUAU | 3836 | ATACCTTA GGCTAGCTACAACGA CACCAGAG | 8633 |
| 2885 | GUGAUAAG G UAUUGCAA | 3837 | TTGCAATA GGCTAGCTACAACGA CTTATCAC | 8634 |
| 2883 | GAUAAGGU A UUGCAACC | 3838 | GGTTGCAA GGCTAGCTACAACGA ACCTTATC | 8635 |
| 2880 | AAGGUAUU G CAACCACC | 3839 | GGTGGTTG GGCTAGCTACAACGA AATACCTT | 8636 |
| 2877 | GUAUUGCA A CCACCAUA | 3840 | TATGGTGG GGCTAGCTACAACGA TGCAATAC | 8637 |
| 2874 | UUGCAACC A CCAUAUGA | 3841 | TCATATGG GGCTAGCTACAACGA GGTTGCAA | 8638 |
| 2871 | CAACCACC A UAUGAGCC | 3842 | GGCTCATA GGCTAGCTACAACGA GGTGGTTG | 8639 |
| 2869 | ACCACCAU A UGAGCCUA | 3843 | TAGGCTCA GGCTAGCTACAACGA ATGGTGGT | 8640 |
| 2865 | CCAUAUGA G CCUAGCGA | 3844 | TCGCTAGG GGCTAGCTACAACGA TCATATGG | 8641 |
| 2860 | UGAGCCUA G CGAGGAAC | 3845 | GTTCCTCG GGCTAGCTACAACGA TAGGCTCA | 8642 |
| 2853 | AGCGAGGA A CACUUUGU | 3846 | ACAAAGTG GGCTAGCTACAACGA TCCTCGCT | 8643 |
| 2851 | CGAGGAAC A CUUUGUAG | 3847 | CTACAAAG GGCTAGCTACAACGA GTTCCTCG | 8644 |
| 2846 | AACACUUU G UAGUAUGG | 3848 | CCATACTA GGCTAGCTACAACGA AAAGTGTT | 8645 |
| 2843 | ACUUUGUA G UAUGGUGA | 3849 | TCACCATA GGCTAGCTACAACGA TACAAAGT | 8646 |
| 2841 | UUUGUAGU A UGGUGACA | 3850 | TGTCACCA GGCTAGCTACAACGA ACTACAAA | 8647 |
| 2838 | GUAGUAUG G UGACAAGG | 3851 | CCTTGTCA GGCTAGCTACAACGA CATACTAC | 8648 |
| 2835 | GUAUGGUG A CAAGGUCA | 3852 | TGACCTTG GGCTAGCTACAACGA CACCATAC | 8649 |
| 2830 | GUGACAAG G UCAAGAGU | 3853 | ACTCTTGA GGCTAGCTACAACGA CTTGTCAC | 8650 |
| 2823 | GGUCAAGA G UGCUAGAC | 3854 | GTCTAGCA GGCTAGCTACAACGA TCTTGACC | 8651 |
| 2821 | UCAAGAGU G CUAGACCU | 3855 | AGGTCTAG GGCTAGCTACAACGA ACTCTTGA | 8652 |
| 2816 | AGUGCUAG A CCUACAAA | 3856 | TTTGTAGG GGCTAGCTACAACGA CTAGCACT | 8653 |
| 2812 | CUAGACCU A CAAAAACC | 3857 | GGTTTTTG GGCTAGCTACAACGA AGGTCTAG | 8654 |
| 2806 | CUACAAAA A CCACGCCU | 3858 | AGGCGTGG GGCTAGCTACAACGA TTTTGTAG | 8655 |
| 2803 | CAAAAACC A CGCCUCCG | 3859 | CGGAGGCG GGCTAGCTACAACGA GGTTTTTG | 8656 |
| 2801 | AAAACCAC G CCUCCGCA | 3860 | TGCGGAGG GGCTAGCTACAACGA GTGGTTTT | 8657 |
| 2795 | ACGCCUCC G CACGAUGC | 3861 | GCATCGTG GGCTAGCTACAACGA GGAGGCGT | 8658 |
| 2793 | GCCUCCGC A CGAUGCGG | 3862 | CCGCATCG GGCTAGCTACAACGA GCGGAGGC | 8659 |
| 2790 | UCCGCACG A UGCGGCCA | 3863 | TGGCCGCA GGCTAGCTACAACGA CGTGCGGA | 8660 |
| 2788 | CGCACGAU G CGGCCAUC | 3864 | GATGGCCG GGCTAGCTACAACGA ATCGTGCG | 8661 |
| 2785 | ACGAUGCG G CCAUCUCC | 3865 | GGAGATGG GGCTAGCTACAACGA CGCATCGT | 8662 |
| 2782 | AUGCGGCC A UCUCCCGG | 3866 | CCGGGAGA GGCTAGCTACAACGA GGCCGCAT | 8663 |
| 2774 | AUCUCCCG G UCCAUGGC | 3867 | GCCATGGA GGCTAGCTACAACGA CGGGAGAT | 8664 |
| 2770 | CCCGGUCC A UGGCGUAC | 3868 | GTACGCCA GGCTAGCTACAACGA GGACCGGG | 8665 |
| 2767 | GGUCCAUG G CGUACGCC | 3869 | GGCGTACG GGCTAGCTACAACGA CATGGACC | 8666 |
| 2765 | UCCAUGGC G UACGCCCG | 3870 | CGGGCGTA GGCTAGCTACAACGA GCCATGGA | 8667 |
| 2763 | CAUGGCGU A CGCCCGUG | 3871 | CACGGGCG GGCTAGCTACAACGA ACGCCATG | 8668 |
| 2761 | UGGCGUAC G CCCGUGGU | 3872 | ACCACGGG GGCTAGCTACAACGA GTACGCCA | 8669 |
| 2757 | GUACGCCC G UGGUGGUA | 3873 | TACCACCA GGCTAGCTACAACGA GGGCGTAC | 8670 |
| 2754 | CGCCCGUG G UGGUAACG | 3874 | CGTTACCA GGCTAGCTACAACGA CACGGGCG | 8671 |
| 2751 | CCGUGGUG G UAACGCCA | 3875 | TGGCGTTA GGCTAGCTACAACGA CACCACGG | 8672 |
| 2748 | UGGUGGUA A CGCCAGCA | 3876 | TGCTGGCG GGCTAGCTACAACGA TACCACCA | 8673 |
| 2746 | GUGGUAAC G CCAGCAGG | 3877 | CCTGCTGG GGCTAGCTACAACGA GTTACCAC | 8674 |
| 2742 | UAACGCCA G CAGGAGCA | 3878 | TGCTCCTG GGCTAGCTACAACGA TGGCGTTA | 8675 |
| 2736 | CAGCAGGA G CAGGAGUA | 3879 | TACTCCTG GGCTAGCTACAACGA TCCTGCTG | 8676 |
| 2730 | GAGCAGGA G UAGCGGCC | 3880 | GGCCGCTA GGCTAGCTACAACGA TCCTGCTC | 8677 |
| 2727 | CAGGAGUA G CGGCCAUA | 3881 | TATGGCCG GGCTAGCTACAACGA TACTCCTG | 8678 |
| 2724 | GAGUAGCG G CCAUACGC | 3882 | GCGTATGG GGCTAGCTACAACGA CGCTACTC | 8679 |
| 2721 | UAGCGGCC A UACGCCGU | 3883 | ACGGCGTA GGCTAGCTACAACGA GGCCGCTA | 8680 |
| 2719 | GCGGCCAU A CGCCGUAG | 3884 | CTACGGCG GGCTAGCTACAACGA ATGGCCGC | 8681 |
| 2717 | GGCCAUAC G CCGUAGAG | 3885 | CTCTACGG GGCTAGCTACAACGA GTATGGCC | 8682 |
| 2714 | CAUACGCC G UAGAGAGC | 3886 | GCTCTCTA GGCTAGCTACAACGA GGCGTATG | 8683 |
| 2707 | CGUAGAGA G CAUAUGCC | 3887 | GGCATATG GGCTAGCTACAACGA TCTCTACG | 8684 |
| 2705 | UAGAGAGC A UAUGCCGC | 3888 | GCGGCATA GGCTAGCTACAACGA GCTCTCTA | 8685 |
| 2703 | GAGAGCAU A UGCCGCCC | 3889 | GGGCGGCA GGCTAGCTACAACGA ATGCTCTC | 8686 |
| 2701 | GAGCAUAU G CCGCCCCA | 3890 | TGGGGCGG GGCTAGCTACAACGA ATATGCTC | 8687 |
| 2698 | CAUAUGCC G CCCCAGGG | 3891 | CCCTGGGG GGCTAGCTACAACGA GGCATATG | 8688 |
| 2689 | CCCCAGGG A CCAGCUUG | 3892 | CAAGCTGG GGCTAGCTACAACGA CCCTGGGG | 8689 |
| 2685 | AGGGACCA G CUUGCCUU | 3893 | AAGGCAAG GGCTAGCTACAACGA TGGTCCCT | 8690 |
| 2681 | ACCAGCUU G CCUUUGAU | 3894 | ATCAAAGG GGCTAGCTACAACGA AAGCTGGT | 8691 |
| 2674 | UGCCUUUG A UGUACCAG | 3895 | CTGGTACA GGCTAGCTACAACGA CAAAGGCA | 8692 |
| 2672 | CCUUUGAU G UACCAGGC | 3896 | GCCTGGTA GGCTAGCTACAACGA ATCAAAGG | 8693 |
| 2670 | UUUGAUGU A CCAGGCAG | 3897 | CTGCCTGG GGCTAGCTACAACGA ACATCAAA | 8694 |
| 2665 | UGUACCAG G CAGCACAG | 3898 | CTGTGCTG GGCTAGCTACAACGA CTGGTACA | 8695 |
| 2662 | ACCAGGCA G CACAGAAG | 3899 | CTTCTGTG GGCTAGCTACAACGA TGCCTGGT | 8696 |
| 2660 | CAGGCAGC A CAGAAGAA | 3900 | TTCTTCTG GGCTAGCTACAACGA GCTGCCTG | 8697 |
| 2652 | ACAGAAGA A CACGAGGA | 3901 | TCCTCGTG GGCTAGCTACAACGA TCTTCTGT | 8698 |
| 2650 | AGAAGAAC A CGAGGAAG | 3902 | CTTCCTCG GGCTAGCTACAACGA GTTCTTCT | 8699 |
| 2635 | AGGAGAGG A UGCCAUGC | 3903 | GCATGGCA GGCTAGCTACAACGA CCTCTCCT | 8700 |
| 2633 | GAGAGGAU G CCAUGCAC | 3904 | GTGCATGG GGCTAGCTACAACGA ATCCTCTC | 8701 |
| 2630 | AGGAUGCC A UGCACUCC | 3905 | GGAGTGCA GGCTAGCTACAACGA GGCATCCT | 8702 |
| 2628 | GAUGCCAU G CACUCCGG | 3906 | CCGGAGTG GGCTAGCTACAACGA ATGGCATC | 8703 |
| 2626 | UGCCAUGC A CUCCGGCC | 3907 | GGCCGGAG GGCTAGCTACAACGA GCATGGCA | 8704 |
| 2620 | GCAGUCCG G CCAAGGAU | 3908 | ATCCTTGG GGCTAGCTACAACGA CGGAGTGC | 8705 |
| 2613 | GGCCAAGG A UGCUGCAU | 3909 | ATGCAGCA GGCTAGCTACAACGA CCTTGGCC | 8706 |
| 2611 | CCAAGGAU G CUGCAUUG | 3910 | CAATGCAG GGCTAGCTACAACGA ATCCTTGG | 8707 |
| 2608 | AGGAUGCU G CAUUGAGG | 3911 | CCTCAATG GGCTAGCTACAACGA AGCATCCT | 8708 |
| 2606 | GAUGCUGC A UUGAGGAC | 3912 | GTCCTCAA GGCTAGCTACAACGA GCAGCATC | 8709 |
| 2599 | CAUUGAGG A CCACCAGG | 3913 | CCTGGTGG GGCTAGCTACAACGA CCTCAATG | 8710 |
| 2596 | UGAGGACC A CCAGGUUC | 3914 | GAACCTGG GGCTAGCTACAACGA GGTCCTCA | 8711 |
| 2591 | ACCACCAG G UUCUCUAG | 3915 | CTAGAGAA GGCTAGCTACAACGA CTGGTGGT | 8712 |
| 2581 | UCUCUAGG G CAGCCUCG | 3916 | CGAGGCTG GGCTAGCTACAACGA CCTAGAGA | 8713 |
| 2578 | CUAGGGCA G CCUCGGCC | 3917 | GGCCGAGG GGCTAGCTACAACGA TGCCCTAG | 8714 |
| 2572 | CAGCCUCG G CCUGGGCU | 3918 | AGCCCAGG GGCTAGCTACAACGA CGAGGCTG | 8715 |
| 2566 | CGGCCUGG G CUACCAAC | 3919 | GTTGGTAG GGCTAGCTACAACGA CCAGGCCG | 8716 |
| 2563 | CCUGGGCU A CCAACAGC | 3920 | GCTGTTGG GGCTAGCTACAACGA AGCCCAGG | 8717 |
| 2559 | GGCUACCA A CAGCAUCA | 3921 | TGATGCTG GGCTAGCTACAACGA TGGTAGCC | 8718 |
| 2556 | UACCAACA G CAUCAUCC | 3922 | GGATGATG GGCTAGCTACAACGA TGTTGGTA | 8719 |
| 2554 | CCAACAGC A UCAUCCAC | 3923 | GTGGATGA GGCTAGCTACAACGA GCTGTTGG | 8720 |
| 2551 | ACAGCAUC A UCCACAAA | 3924 | TTTGTGGA GGCTAGCTACAACGA GATGCTGT | 8721 |
| 2547 | CAUCAUCC A CAAACAGG | 3925 | CCTGTTTG GGCTAGCTACAACGA GGATGATG | 8722 |
| 2543 | AUCCACAA A CAGGCACA | 3926 | TGTGCCTG GGCTAGCTACAACGA TTGTGGAT | 8723 |
| 2539 | ACAAACAG G CACAGACG | 3927 | CGTCTGTG GGCTAGCTACAACGA CTGTTTGT | 8724 |
| 2537 | AAACAGGC A CAGACGCG | 3928 | CGCGTCTG GGCTAGCTACAACGA GCCTGTTT | 8725 |
| 2533 | AGGCACAG A CGCGCGCG | 3929 | CGCGCGCG GGCTAGCTACAACGA CTGTGCCT | 8726 |
| 2531 | GCACAGAC G CGCGCGUC | 3930 | GACGCGCG GGCTAGCTACAACGA GTCTGTGC | 8727 |
| 2529 | ACAGACGC G CGCGUCUG | 3931 | CAGACGCG GGCTAGCTACAACGA GCGTCTGT | 8728 |
| 2527 | AGACGCGC G CGUCUGCC | 3932 | GGCAGACG GGCTAGCTACAACGA GCGCGTCT | 8729 |
| 2525 | ACGCGCGC G UCUGCCAG | 3933 | CTGGCAGA GGCTAGCTACAACGA GCGCGCGT | 8730 |
| 2521 | GCGCGUCU G CCAGGAGA | 3934 | TCTCCTGG GGCTAGCTACAACGA AGACGCGC | 8731 |
| 2505 | AAGGAAAA G CAACAGGA | 3935 | TCCTGTTG GGCTAGCTACAACGA TTTTCCTT | 8732 |
| 2502 | GAAAAGCA A CAGGACAU | 3936 | ATGTCCTG GGCTAGCTACAACGA TGCTTTTC | 8733 |
| 2497 | GCAACAGG A CAUACUCC | 3937 | GGAGTATG GGCTAGCTACAACGA CCTGTTGC | 8734 |
| 2495 | AACAGGAC A UACUCCCA | 3938 | TGGGAGTA GGCTAGCTACAACGA GTCCTGTT | 8735 |
| 2493 | CAGGACAU A CUCCCAUU | 3939 | AATGGGAG GGCTAGCTACAACGA ATGTCCTG | 8736 |
| 2487 | AUACUCCC A UUUGAUUG | 3940 | CAATCAAA GGCTAGCTACAACGA GGGAGTAT | 8737 |
| 2482 | CCCAUUUG A UUGCGAAG | 3941 | CTTCGCAA GGCTAGCTACAACGA CAAATGGG | 8738 |
| 2479 | AUUUGAUU G CGAAGGAG | 3942 | CTCCTTCG GGCTAGCTACAACGA AATCAAAT | 8739 |
| 2470 | CGAAGGAG A CAACCGCU | 3943 | AGCGGTTG GGCTAGCTACAACGA CTCCTTCG | 8740 |
| 2467 | AGGAGACA A CCGCUGAC | 3944 | GTCAGCGG GGCTAGCTACAACGA TGTCTCCT | 8741 |
| 2464 | AGACAACC G CUGACCCU | 3945 | AGGGTCAG GGCTAGCTACAACGA GGTTGTCT | 8742 |
| 2460 | AACCGCUG A CCCUACAC | 3946 | GTGTAGGG GGCTAGCTACAACGA CAGCGGTT | 8743 |
| 2455 | CUGACCCU A CACCGUAC | 3947 | GTACGGTG GGCTAGCTACAACGA AGGGTCAG | 8744 |
| 2453 | GACCCUAC A CCGUACAG | 3948 | CTGTACGG GGCTAGCTACAACGA GTAGGGTC | 8745 |
| 2450 | CCUACACC G UACAGGUA | 3949 | TACCTGTA GGCTAGCTACAACGA GGTGTAAG | 8746 |
| 2448 | UACACCGU A CAGGUAUU | 3950 | AATACCTG GGCTAGCTACAACGA ACGGTGTA | 8747 |
| 2444 | CCGUACAG G UAUUGCAC | 3951 | GTGCAATA GGCTAGCTACAACGA CTGTACGG | 8748 |
| 2442 | GUACAGGU A UUGCACGU | 3952 | ACGTGCAA GGCTAGCTACAACGA ACCTGTAC | 8749 |
| 2439 | CAGGUAUU G CACGUCCA | 3953 | TGGACGTG GGCTAGCTACAACGA AATACCTG | 8750 |
| 2437 | GGUAUUGC A CGUCCACG | 3954 | CGTGGACG GGCTAGCTACAACGA GCAATACC | 8751 |
| 2435 | UAUUGCAC G UCCACGAU | 3955 | ATCGTGGA GGCTAGCTACAACGA GTGCAATA | 8752 |
| 2431 | GCACGUCC A CGAUGUUC | 3956 | GAACATCG GGCTAGCTACAACGA GGACGTGC | 8753 |
| 2428 | CGUCCACG A UGUUCUGG | 3957 | CCAGAACA GGCTAGCTACAACGA CGTGGACG | 8754 |
| 2426 | UCCACGAU G UUCUGGUG | 3958 | CACCAGAA GGCTAGCTACAACGA ATCGTGGA | 8755 |
| 2420 | AUGUUCUG G UGGAGAUG | 3959 | CATCTCCA GGCTAGCTACAACGA CAGAACAT | 8756 |
| 2414 | UGGUGGAG A UGGAUCAA | 3960 | TTGATCCA GGCTAGCTACAACGA CTCCACCA | 8757 |
| 2410 | GGAGAUGG A UCAAACCA | 3961 | TGGTTTGA GGCTAGCTACAACGA CCATCTCC | 8758 |
| 2405 | UGGAUCAA A CCAGUGGA | 3962 | TCCACTGG GGCTAGCTACAACGA TTGATCCA | 8759 |
| 2401 | UCAAACCA G UGGACAGA | 3963 | TCTGTCCA GGCTAGCTACAACGA TGGTTTGA | 8760 |
| 2397 | ACCAGUGG A CAGAGCCG | 3964 | CGGCTCTG GGCTAGCTACAACGA CCACTGGT | 8761 |
| 2392 | UGGACAGA G CCGGUAGG | 3965 | CCTACCGG GGCTAGCTACAACGA TCTGTCCA | 8762 |
| 2388 | CAGAGCCG G UAGGGUGG | 3966 | CCACCCTA GGCTAGCTACAACGA CGGCTCTG | 8763 |
| 2383 | CCGGUAGG G UGGUGAAG | 3967 | CTTCACCA GGCTAGCTACAACGA CCTACCGG | 8764 |
| 2380 | GUAGGGUG G UGAAGGAG | 3968 | CTCCTTCA GGCTAGCTACAACGA CACCCTAC | 8765 |
| 2372 | GUGAAGGA G CAGGGCAG | 3969 | CTGCCCTG GGCTAGCTACAACGA TCCTTCAC | 8766 |
| 2367 | GGAGCAGG G CAGUAUUU | 3970 | AAATACTG GGCTAGCTACAACGA CCTGCTCC | 8767 |
| 2364 | GCAGGGCA G UAUUUGCC | 3971 | GGCAAATA GGCTAGCTACAACGA TGCCCTGC | 8768 |
| 2362 | AGGGCAGU A UUUGCCAC | 3972 | GTGGCAAA GGCTAGCTACAACGA ACTGCCCT | 8769 |
| 2358 | CAGUAUUU G CCACUCUG | 3973 | CAGAGTGG GGCTAGCTACAACGA AAATACTG | 8770 |
| 2355 | UAUUUGCC A CUCUGUAG | 3974 | CTACAGAG GGCTAGCTACAACGA GGCAAATA | 8771 |
| 2350 | GCCACUCU G UAGUGGAC | 3975 | GTCCACTA GGCTAGCTACAACGA AGAGTGGC | 8772 |
| 2347 | ACUCUGUA G UGGACAAC | 3976 | GTTGTCCA GGCTAGCTACAACGA TACAGAGT | 8773 |
| 2343 | UGUAGUGG A CAACAGCA | 3977 | TGCTGTTG GGCTAGCTACAACGA CCACTACA | 8774 |
| 2340 | AGUGGACA A CAGCAGCG | 3978 | CGCTGCTG GGCTAGCTACAACGA TGTCCACT | 8775 |
| 2337 | GGACAACA G CAGCGGGC | 3979 | GCCCGCTG GGCTAGCTACAACGA TGTTGTCC | 8776 |
| 2334 | CAACAGCA G CGGGCUGA | 3980 | TCAGCCCG GGCTAGCTACAACGA TGCTGTTG | 8777 |
| 2330 | AGCAGCGG G CUGAGCUC | 3981 | GAGCTCAG GGCTAGCTACAACGA CCGCTGCT | 8778 |
| 2325 | CGGGCUGA G CUCUGAUC | 3982 | GGGACAGA GGCTAGCTACAACGA TCAGCCCG | 8779 |
| 2319 | GAGCUCUG A UCUGUCCC | 3983 | GGGACAGA GGCTAGCTACAACGA CAGAGCTC | 8780 |
| 2315 | UCUGAUCU G UCCCUGUC | 3984 | GACAGGGA GGCTAGCTACAACGA AGATCAGA | 8781 |
| 2309 | CUGUCCCU G UCCUCCAA | 3985 | TTGGAGGA GGCTAGCTACAACGA AGGGACAG | 8782 |
| 2300 | UCCUCCAA A UCACAACG | 3986 | CGTTGTGA GGCTAGCTACAACGA TTGGAGGA | 8783 |
| 2297 | UCCAAAUC A CAACGCUC | 3987 | GAGCGTTG GGCTAGCTACAACGA GATTTGGA | 8784 |
| 2294 | AAAUCACA A CGCUCUCC | 3988 | GGAGAGCG GGCTAGCTACAACGA TGTGATTT | 8785 |
| 2292 | AUCACAAC G CUCUCCUC | 3989 | GAGGAGAG GGCTAGCTACAACGA GTTGTGAT | 8786 |
| 2281 | CUCCUCGA G UCCAAUUG | 3990 | CAATTGGA GGCTAGCTACAACGA TCGAGGAG | 8787 |
| 2276 | CGAGUCCA A UUGCAUGC | 3991 | GCATGCAA GGCTAGCTACAACGA TGGACTCG | 8788 |
| 2273 | GUCCAAUU G CAUGCGGC | 3992 | GCCGCATG GGCTAGCTACAACGA AATTGGAC | 8789 |
| 2271 | CCAAUUGC A UGCGGCGG | 3993 | CCGCCGCA GGCTAGCTACAACGA GCAATTGG | 8790 |
| 2269 | AAUUGCAU G CGGCGGUG | 3994 | CACCGCCG GGCTAGCTACAACGA ATGCAATT | 8791 |
| 2266 | UGCAUGCG G CGGUGAGC | 3995 | GCTCACCG GGCTAGCTACAACGA CGCATGCA | 8792 |
| 2263 | AUGCGGCG G UGAGCCUG | 3996 | CAGGCTCA GGCTAGCTACAACGA CGCCGCAT | 8793 |
| 2259 | GGCGGUGA G CCUGUGCU | 3997 | AGCACAGG GGCTAGCTACAACGA TCACCGCC | 8794 |
| 2255 | GUGAGCCU G UGCUCCAC | 3998 | GTGGAGCA GGCTAGCTACAACGA AGGCTCAC | 8795 |
| 2253 | GAGCCUGU G CUCCACGC | 3999 | GCGTGGAG GGCTAGCTACAACGA ACAGGCTC | 8796 |
| 2248 | UGUGCUCC A CGCCCCCC | 4000 | GGGGGGCG GGCTAGCTACAACGA GGAGCACA | 8797 |
| 2246 | UGCUCCAC G CCCCCCAC | 4001 | GTGGGGGG GGCTAGCTACAACGA GTGGAGCA | 8798 |
| 2239 | CGCCCCCC A CAUACAUC | 4002 | GATGTATG GGCTAGCTACAACGA GGGGGGCG | 8799 |
| 2237 | CCCCCCAC A UACAUCCU | 4003 | AGGATGTA GGCTAGCTACAACGA GTGGGGGG | 8800 |
| 2235 | CCCCACAU A CAUCCUAA | 4004 | TTAGGATG GGCTAGCTACAACGA ATGTGGGG | 8801 |
| 2233 | CCACAUAC A UCCUAACC | 4005 | GGTTAGGA GGCTAGCTACAACGA GTATGTGG | 8802 |
| 2227 | ACAUCCUA A CCUUAAAG | 4006 | CTTTAAGG GGCTAGCTACAACGA TAGGATGT | 8803 |
| 2218 | CCUUAAAG A UGGAAAAA | 4007 | TTTTTCCA GGCTAGCTACAACGA CTTTAAGG | 8804 |
| 2210 | AUGGAAAA A UUGACAGU | 4008 | ACTGTCAA GGCTAGCTACAACGA TTTTCCAT | 8805 |
| 2206 | AAAAAUUG A CAGUGCAG | 4009 | CTGCACTG GGCTAGCTACAACGA CAATTTTT | 8806 |
| 2203 | AAUUGACA G UGCAGGGG | 4010 | CCCCTGCA GGCTAGCTACAACGA TGTCAATT | 8807 |
| 2201 | UUGACAGU G CAGGGGUA | 4011 | TACCCCTG GGCTAGCTACAACGA ACTGTCAA | 8808 |
| 2195 | GUGCAGGG G UAGUGCCA | 4012 | TGGCACTA GGCTAGCTACAACGA CCCTGCAC | 8809 |
| 2292 | CAGGGGUA G UGCCAAAG | 4013 | CTTTGGCA GGCTAGCTACAACGA TACCCCTG | 8810 |
| 2190 | GGGGUAGU G CCAAAGCC | 4014 | GGCTTTGG GGCTAGCTACAACGA ACTACCCC | 8811 |
| 2184 | GUGCCAAA G CCUGUAUG | 4015 | CATACAGG GGCTAGCTACAACGA TTTGGCAC | 8812 |
| 2180 | CAAAGCCU G UAUGGGUA | 4016 | TACCCATA GGCTAGCTACAACGA AGGCTTTG | 8813 |
| 2178 | AAGCCUGU A UGGGUAGU | 4017 | ACTACCCA GGCTAGCTACAACGA ACAGGCTT | 8814 |
| 2174 | CUGUAUGG G UAGUCAAC | 4018 | GTTGACTA GGCTAGCTACAACGA CCATACAG | 8815 |
| 2171 | UAUGGGUA G UCAACUAU | 4019 | ATAGTTGA GGCTAGCTACAACGA TACCCATA | 8816 |
| 2167 | GGUAGUCA A CUAUGCAU | 4020 | ATGCATAG GGCTAGCTACAACGA TGACTACC | 8817 |
| 2164 | AGUCAACU A UGCAUCUA | 4021 | TAGATGCA GGCTAGCTACAACGA AGTTGACT | 8818 |
| 2162 | UCAACUAU G CAUCUAGG | 4022 | CCTAGATG GGCTAGCTACAACGA ATAGTTGA | 8819 |
| 2160 | AACUAUGC A UCUAGGUG | 4023 | CACCTAGA GGCTAGCTACAACGA GCATAGTT | 8820 |
| 2154 | GCAUCUAG G UGUUAACC | 4024 | GGTTAACA GGCTAGCTACAACGA CTAGATGC | 8821 |
| 2152 | AUCUAGGU G UUAACCAA | 4025 | TTGGTTAA GGCTAGCTACAACGA ACCTAGAT | 8822 |
| 2148 | AGGUGUUA A CCAAGGCC | 4026 | GGCCTTGG GGCTAGCTACAACGA TAACACCT | 8823 |
| 2142 | UAACCAAG G CCCCGAAC | 4027 | GTTCGGGG GGCTAGCTACAACGA CTTGGTTA | 8824 |
| 2135 | GGCCCCGA A CCGCACUU | 4028 | AAGTGCGG GGCTAGCTACAACGA TCGGGGCC | 8825 |
| 2132 | CCCGAACC G CACUUUGC | 4029 | GCAAAGTG GGCTAGCTACAACGA GGTTCGGG | 8826 |
| 2130 | CGAACCGC A CUUUGCGU | 4030 | ACGCAAAG GGCTAGCTACAACGA GCGGTTCG | 8827 |
| 2125 | CGCACUUU G CGUAAGUG | 4031 | CACTTACG GGCTAGCTACAACGA AAAGTGCG | 8828 |
| 2123 | CACUUUGC G UAAGUGGC | 4032 | GCCACTTA GGCTAGCTACAACGA GCAAAGTG | 8829 |
| 2119 | UUGCGUAA G UGGCCUCG | 4033 | CGAGGCCA GGCTAGCTACAACGA TTACGCAA | 8830 |
| 2116 | CGUAAGUG G CCUCGGGG | 4034 | CCCCGAGG GGCTAGCTACAACGA CACTTACG | 8831 |
| 2108 | GCCUCGGG G UGCUUCCG | 4035 | CGGAAGCA GGCTAGCTACAACGA CCCGAGGC | 8832 |
| 2106 | CUCGGGGU G CUUCCGGA | 4036 | TCCGGAAG GGCTAGCTACAACGA ACCCCGAG | 8833 |
| 2096 | UUCCGGAA G CAGUCCGU | 4037 | ACGGACTG GGCTAGCTACAACGA TTCCGGAA | 8834 |
| 2093 | CGGAAGCA G UCCGUGGG | 4038 | CCCACGGA GGCTAGCTACAACGA TGCTTCCG | 8835 |
| 2089 | AGCAGUCC G UGGGGCAG | 4039 | CTGCCCCA GGCTAGCTACAACGA GGACTGCT | 8836 |
| 2084 | UCCGUGGG G CAGGUUAA | 4040 | TTAACCTG GGCTAGCTACAACGA CCCACGGA | 8837 |
| 2080 | UGGGGCAG G UUAAGGUG | 4041 | CACCTTAA GGCTAGCTACAACGA CTGCCCCA | 8838 |
| 2074 | AGGUUAAG G UGUCGUUA | 4042 | TAACGACA GGCTAGCTACAACGA CTTAACCT | 8839 |
| 2072 | GUUAAGGU G UCGUUACC | 4043 | GGTAACGA GGCTAGCTACAACGA ACCTTAAC | 8840 |
| 2069 | AAGGUGUC G UUACCGGC | 4044 | GCCGGTAA GGCTAGCTACAACGA GACACCTT | 8841 |
| 2066 | GUGUCGUU A CCGGCCCC | 4045 | GGGGCCGG GGCTAGCTACAACGA AACGACAC | 8842 |
| 2062 | CGUUACCG G CCCCCCCG | 4046 | CGGGGGGG GGCTAGCTACAACGA CGGTAACG | 8843 |
| 2053 | CCCCCCCG A UGUUGCAC | 4047 | GTGCAACA GGCTAGCTACAACGA CGGGGGGG | 8844 |
| 2051 | CCCCCGAU G UUGCACGG | 4048 | CCGTGCAA GGCTAGCTACAACGA ATCGGGGG | 8845 |
| 2048 | CCGAUGUU G CACGGGGG | 4049 | CCCCCGTG GGCTAGCTACAACGA AACATCGG | 8846 |
| 2046 | GAUGUUGC A CGGGGGGC | 4050 | GCCCCCCG GGCTAGCTACAACGA GCAACATC | 8847 |
| 2039 | CACGGGGG G CCCCCGCA | 4051 | TGCGGGGG GGCTAGCTACAACGA CCCCCGTG | 8848 |
| 2033 | GGGCCCCC G CACGUCUU | 4052 | AAGACGTG GGCTAGCTACAACGA GGGGGCCC | 8849 |
| 2031 | GCCCCCGC A CGUCUUGG | 4053 | CCAAGACG GGCTAGCTACAACGA GCGGGGGC | 8850 |
| 2029 | CCCCGCAC G UCUUGGUG | 4054 | CACCAAGA GGCTAGCTACAACGA GTGCGGGG | 8851 |
| 2023 | ACGUCUUG G UGAACCCA | 4055 | TGGGTTCA GGCTAGCTACAACGA CAAGACGT | 8852 |
| 2019 | CUUGGUGA A CCCAGUGC | 4056 | GCACTGGG GGCTAGCTACAACGA TCACCAAG | 8853 |
| 2014 | UGAACCCA G UGCCAUUC | 4057 | GAATGGCA GGCTAGCTACAACGA TGGGTTCA | 8854 |
| 2012 | AACCCAGU G CCAUUCAU | 4058 | ATGAATGG GGCTAGCTACAACGA ACTGGGTT | 8855 |
| 2009 | CCAGUGCC A UUCAUCCA | 4059 | TGGATGAA GGCTAGCTACAACGA GGCACTGG | 8856 |
| 2005 | UGCCAUUC A UCCAUGUG | 4060 | CACATGGA GGCTAGCTACAACGA GAATGGCA | 8857 |
| 2001 | AUUCAUCC A UGUGCAGC | 4061 | GCTGCACA GGCTAGCTACAACGA GGATGAAT | 8858 |
| 1999 | UCAUCCAU G UGCAGCCG | 4062 | CGGCTGCA GGCTAGCTACAACGA ATGGATGA | 8859 |
| 1997 | AUCCAUGU G CAGCCGAA | 4063 | TTCGGCTG GGCTAGCTACAACGA ACATGGAT | 8860 |
| 1994 | CAUGUGCA G CCGAACCA | 4064 | TGGTTCGG GGCTAGCTACAACGA TGCACATG | 8861 |
| 1989 | GCAGCCGA A CCAGUUGC | 4065 | GCAACTGG GGCTAGCTACAACGA TCGGCTGC | 8862 |
| 1985 | CCGAACCA G UUGCCUUG | 4066 | CAAGGCAA GGCTAGCTACAACGA TGGTTCGG | 8863 |
| 1982 | AACCAGUU G CCUUGCGG | 4067 | CCGCAAGG GGCTAGCTACAACGA AACTGGTT | 8864 |
| 1977 | GUUGCCUU G CGGCGGCC | 4068 | GGCCGCCG GGCTAGCTACAACGA AAGGCAAC | 8865 |
| 1974 | GCCUUGCG G CGGCCGCG | 4069 | CGCGGCCG GGCTAGCTACAACGA CGCAAGGC | 8866 |
| 1971 | UUGCGGCG G CCGCGUGU | 4070 | ACACGCGG GGCTAGCTACAACGA CGCCGCAA | 8867 |
| 1968 | CGGCGGCC G CGUGUUGU | 4071 | ACAACACG GGCTAGCTACAACGA GGCCGCCG | 8868 |
| 1966 | GCGGCCGC G UGUUGUUG | 4072 | CAACAACA GGCTAGCTACAACGA GCGGCCGC | 8869 |
| 1964 | GGCCGCGU G UUGUUGAG | 4073 | CTCAACAA GGCTAGCTACAACGA ACGCGGCC | 8870 |
| 1961 | CGCGUGUU G UUGAGGAG | 4074 | CTCCTCAA GGCTAGCTACAACGA AACACGCG | 8871 |
| 1953 | GUUGAGGA G CAGCACGU | 4075 | ACGTGCTG GGCTAGCTACAACGA TCCTCAAC | 8872 |
| 1950 | GAGGAGCA G CACGUCCG | 4076 | CGGACGTG GGCTAGCTACAACGA TGCTCCTC | 8873 |
| 1948 | GGAGCAGC A CGUCCGUC | 4077 | GACGGACG GGCTAGCTACAACGA GCTGCTCC | 8874 |
| 1946 | AGCAGCAC G UCCGUCUC | 4078 | GAGACGGA GGCTAGCTACAACGA GTGCTGCT | 8875 |
| 1942 | GCACGUCC G UCUCGUUC | 4079 | GAACGAGA GGCTAGCTACAACGA GGACGTGC | 8876 |
| 1937 | UCCGUCUC G UUCGCCCC | 4080 | GGGGCGAA GGCTAGCTACAACGA GAGACGGA | 8877 |
| 1933 | UCUCGUUC G CCCCCCAG | 4081 | CTGGGGGG GGCTAGCTACAACGA GAACGAGA | 8878 |
| 1925 | GCCCCCCA G UUAUACGU | 4082 | ACGTATAA GGCTAGCTACAACGA TGGGGGGC | 8879 |
| 1922 | CCCCAGUU A UACGUGGG | 4083 | CCCACGTA GGCTAGCTACAACGA AACTGGGG | 8880 |
| 1920 | CCAGUUAU A CGUGGGGG | 4084 | CCCCCACG GGCTAGCTACAACGA ATAACTGG | 8881 |
| 1918 | AGUUAUAC G UGGGGGCG | 4085 | CGCCCCCA GGCTAGCTACAACGA GTATAACT | 8882 |
| 1912 | ACGUGGGG G CGCCGAAA | 4086 | TTTCGGCG GGCTAGCTACAACGA CCCCACGT | 8883 |
| 1910 | GUGGGGGC G CCGAAACG | 4087 | CGTTTCGG GGCTAGCTACAACGA GCCCCCAC | 8884 |
| 1904 | GCGCCGAA A CGGUCGGU | 4088 | ACCGACCG GGCTAGCTACAACGA TTCGGCGC | 8885 |
| 1901 | CCGAAACG G UCGGUCGU | 4089 | ACGACCGA GGCTAGCTACAACGA CGTTTCGG | 8886 |
| 1897 | AACGGUCG G UCGUCCCC | 4090 | GGGGACGA GGCTAGCTACAACGA CGACCGTT | 8887 |
| 1894 | GGUCGGUC G UCCCCACC | 4091 | GGTGGGGA GGCTAGCTACAACGA CACCGACC | 8888 |
| 1888 | UCGUCCCC A CCACAACA | 4092 | TGTTGTGG GGCTAGCTACAACGA GGGGACGA | 8889 |
| 1885 | UCCCCACC A CAACAGGG | 4093 | CCCTGTTG GGCTAGCTACAACGA GGTGGGGA | 8890 |
| 1882 | CCACCACA A CAGGGCUU | 4094 | AAGCCCTG GGCTAGCTACAACGA TGTGGTGG | 8891 |
| 1877 | ACAACAGG G CUUGGGGU | 4095 | ACCCCAAG GGCTAGCTACAACGA CCTGTTGT | 8892 |
| 1870 | GGCUUGGG G UGAAGCAA | 4096 | TTGCTTCA GGCTAGCTACAACGA CCCAAGCC | 8893 |
| 1865 | GGGGUGAA G CAAUACAC | 4097 | GTGTATTG GGCTAGCTACAACGA TTCACCCC | 8894 |
| 1862 | GUGAAGCA A UACACUGG | 4098 | CCAGTGTA GGCTAGCTACAACGA TGCTTCAC | 8895 |
| 1860 | GAAGCAAU A CACUGGAC | 4099 | GTCCAGTG GGCTAGCTACAACGA ATTGCTTC | 8896 |
| 1858 | AGCAAUAC A CUGGACCA | 4100 | TGGTCCAG GGCTAGCTACAACGA GTATTGCT | 8897 |
| 1853 | UACACUGG A CCACAUAC | 4101 | GTATGTGG GGCTAGCTACAACGA CCAGTGTA | 8898 |
| 1850 | ACUGGACC A CAUACCUG | 4102 | CAGGTATG GGCTAGCTACAACGA GGTCCAGT | 8899 |
| 1848 | UGGACCAC A UACCUGCG | 4103 | CGCAGGTA GGCTAGCTACAACGA GTGGTCCA | 8900 |
| 1846 | GACCACAU A CCUGCGAU | 4104 | ATCGCAGG GGCTAGCTACAACGA ATGTGGTC | 8901 |
| 1842 | ACAUACCU G CGAUGCGG | 4105 | CCGCATCG GGCTAGCTACAACGA AGGTATGT | 8902 |
| 1839 | UACCUGCG A UGCGGGUA | 4106 | TACCCGCA GGCTAGCTACAACGA CGCAGGTA | 8903 |
| 1837 | CCUGCGAU G CGGGUACG | 4107 | CGTACCCG GGCTAGCTACAACGA ATCGCAGG | 8904 |
| 1833 | CGAUGCGG G UACGAUAC | 4108 | GTATCGTA GGCTAGCTACAACGA CCGCATCG | 8905 |
| 1831 | AUGCGGGU A CGAUACCA | 4109 | TGGTATCG GGCTAGCTACAACGA ACCCGCAT | 8906 |
| 1828 | CGGGUACG A UACCACAC | 4110 | GTGTGGTA GGCTAGCTACAACGA CGTACCCG | 8907 |
| 1826 | GGUACGAU A CCACACGG | 4111 | CCGTGTGG GGCTAGCTACAACGA ATCGTACC | 8908 |
| 1823 | ACGAUACC A CACGGCCG | 4112 | CGGCCGTG GGCTAGCTACAACGA GGTATCGT | 8909 |
| 1821 | GAUACCAC A CGGCCGCG | 4113 | CGCGGCCG GGCTAGCTACAACGA GTGGTATC | 8910 |
| 1818 | ACCACACG G CCGCGGUG | 4114 | CACCGCGG GGCTAGCTACAACGA CGTGTGGT | 8911 |
| 1815 | ACACGGCC G CGGUGCGU | 4115 | ACGCACCG GGCTAGCTACAACGA GGCCGTGT | 8912 |
| 1812 | CGGCCGCG G UGCGUAGU | 4116 | ACTACGCA GGCTAGCTACAACGA CGCGGCCG | 8913 |
| 1810 | GCCGCGGU G CGUAGUGC | 4117 | GCACTACG GGCTAGCTACAACGA ACCGCGGC | 8914 |
| 1808 | CGCGGUGC G UAGUGCCA | 4118 | TGGCACTA GGCTAGCTACAACGA GCACCGCG | 8915 |
| 1805 | GGUGCGUA G UGCCAGCA | 4119 | TGCTGGCA GGCTAGCTACAACGA TACGCACC | 8916 |
| 1803 | UGCGUAGU G CCAGCAAU | 4120 | ATTGCTGG GGCTAGCTACAACGA ACTACGCA | 8917 |
| 1799 | UAGUGCCA G CAAUAGGG | 4121 | CCCTATTG GGCTAGCTACAACGA TGGCACTA | 8918 |
| 1796 | UGCCAGCA A UAGGGCCU | 4122 | AGGCCCTA GGCTAGCTACAACGA TGCTGGCA | 8919 |
| 1791 | GCAAUAGG G CCUCUGGU | 4123 | ACCAGAGG GGCTAGCTACAACGA CCTATTGC | 8920 |
| 1784 | GGCCUCUG G UCCGAGUU | 4124 | AACTCGGA GGCTAGCTACAACGA CAGAGGCC | 8921 |
| 1778 | UGGUCCGA G UUGUGGCC | 4125 | GGCCACAA GGCTAGCTACAACGA TCGGACCA | 8922 |
| 1775 | UCCGAGUU G UGGCCCUC | 4126 | GAGGGCCA GGCTAGCTACAACGA AACTCGGA | 8923 |
| 1772 | GAGUUGUG G CCCUCGGU | 4127 | ACCGAGGG GGCTAGCTACAACGA CACAACTC | 8924 |
| 1765 | GGCCCUCG G UGUAGGUG | 4128 | CACCTACA GGCTAGCTACAACGA CGAGGGCC | 8925 |
| 1763 | CCCUCGGU G UAGGUGAU | 4129 | ATCACCTA GGCTAGCTACAACGA ACCGAGGG | 8926 |
| 1759 | CGGUGUAG G UGAUAGGA | 4130 | TCCTATCA GGCTAGCTACAACGA CTACACCG | 8927 |
| 1756 | UGUAGGUG A UAGGACCC | 4131 | GGGTCCTA GGCTAGCTACAACGA CACCTACA | 8928 |
| 1751 | GUGAUAGG A CCCCACCC | 4132 | GGGTGGGG GGCTAGCTACAACGA CCTATCAC | 8929 |
| 1746 | AGGACCCC A CCCCUGAG | 4133 | CTCAGGGG GGCTAGCTACAACGA GGGGTCCT | 8930 |
| 1738 | ACCCCUGA G CGAACUUG | 4134 | CAAGTTCG GGCTAGCTACAACGA TCAGGGGT | 8931 |
| 1734 | CUGAGCGA A CUUGUCAA | 4135 | TTGACAAG GGCTAGCTACAACGA TCGCTCAG | 8932 |
| 1730 | GCGAACUU G UCAAUGGA | 4136 | TCCATTGA GGCTAGCTACAACGA AAGTTCGC | 8933 |
| 1726 | ACUUGUCA A UGGAGCGG | 4137 | CCGCTCCA GGCTAGCTACAACGA TGACAAGT | 8934 |
| 1721 | UCAAUGGA G CGGCAGCU | 4138 | AGCTGCCG GGCTAGCTACAACGA TCCATTGA | 8935 |
| 1718 | AUGGAGCG G CAGCUGGC | 4139 | GCCAGCTG GGCTAGCTACAACGA CGCTCCAT | 8936 |
| 1715 | GAGCGGCA G CUGGCCAA | 4140 | TTGGCCAG GGCTAGCTACAACGA TGCCGCTC | 8937 |
| 1711 | GGCAGCUG G CCAAGCGC | 4141 | GCGCTTGG GGCTAGCTACAACGA CAGCTGCC | 8938 |
| 1706 | CUGGCCAA G CGCUGUGG | 4142 | CCACAGCG GGCTAGCTACAACGA TTGGCCAG | 8939 |
| 1704 | GGCCAAGC G CUGUGGGC | 4143 | GCCCACAG GGCTAGCTACAACGA GCTTGGCC | 8940 |
| 1701 | CAAGCGCU G UGGGCAUC | 4144 | GATGCCCA GGCTAGCTACAACGA AGCGCTTG | 8941 |
| 1697 | CGCUGUGG G CAUCCGGA | 4145 | TCCGGATG GGCTAGCTACAACGA CCACAGCG | 8942 |
| 1695 | CUGUGGGC A UCCGGACG | 4146 | CGTCCGGA GGCTAGCTACAACGA GCCCACAG | 8943 |
| 1689 | GCAUCCGG A CGAGUUGA | 4147 | TCAACTCG GGCTAGCTACAACGA CCGGATGC | 8944 |
| 1685 | CCGGACGA G UUGAACCU | 4148 | AGGTTCAA GGCTAGCTACAACGA TCGTCCGG | 8945 |
| 1680 | CGAGUUGA A CCUGUGUG | 4149 | CACACAGG GGCTAGCTACAACGA TCAACTCG | 8946 |
| 1676 | UUGAACCU G UGUGCAUA | 4150 | TATGCACA GGCTAGCTACAACGA AGGTTCAA | 8947 |
| 1674 | GAACCUGU G UGCAUAGA | 4151 | TCTATGCA GGCTAGCTACAACGA ACAGGTTC | 8948 |
| 1672 | ACCUGUGU G CAUAGAAC | 4152 | GTTCTATG GGCTAGCTACAACGA ACACAGGT | 8949 |
| 1670 | CUGUGUGC A UAGAACAG | 4153 | CTGTTCTA GGCTAGCTACAACGA GCACACAG | 8950 |
| 1665 | UGCAUAGA A CAGUGCAG | 4154 | CTGCACTG GGCTAGCTACAACGA TCTATGCA | 8951 |
| 1662 | AUAGAACA G UGCAGCAA | 4155 | TTGCTGCA GGCTAGCTACAACGA TGTTCTAT | 8952 |
| 1660 | AGAACAGU G CAGCAAUG | 4156 | CATTGCTG GGCTAGCTACAACGA ACTGTTCT | 8953 |
| 1657 | ACAGUGCA G CAAUGAAC | 4157 | GTTCATTG GGCTAGCTACAACGA TGCACTGT | 8954 |
| 1654 | GUGCAGCA A UGAACCCG | 4158 | CGGGTTCA GGCTAGCTACAACGA TGCTGCAC | 8955 |
| 1650 | AGCAAUGA A CCCGGUUU | 4159 | AAACCGGG GGCTAGCTACAACGA TCATTGCT | 8956 |
| 1645 | UGAACCCG G UUUGGAGG | 4160 | CCTCCAAA GGCTAGCTACAACGA CGGGTTCA | 8957 |
| 1634 | UGGAGGGA G UCAUUGCA | 4161 | TGCAATGA GGCTAGCTACAACGA TCCCTCCA | 8958 |
| 1631 | AGGGAGUC A UUGCAGUU | 4162 | AACTGCAA GGCTAGCTACAACGA GACTCCCT | 8959 |
| 1628 | GAGUCAUU G CAGUUCAG | 4163 | CTGAACTG GGCTAGCTACAACGA AATGACTC | 8960 |
| 1625 | UCAUUGCA G UUCAGGGC | 4164 | GCCCTGAA GGCTAGCTACAACGA TGCAATGA | 8961 |
| 1618 | AGUUCAGG G CAGUCCUG | 4165 | CAGGACTG GGCTAGCTACAACGA CCTGAACT | 8962 |
| 1615 | UCAGGGCA G UCCUGUUA | 4166 | TAACAGGA GGCTAGCTACAACGA TGCCCTGA | 8963 |
| 1610 | GCAGUCCU G UUAAUGUG | 4167 | CACATTAA GGCTAGCTACAACGA AGGACTGC | 8964 |
| 1606 | UCCUGUUA A UGUGCCAG | 4168 | CTGGCACA GGCTAGCTACAACGA TAACAGGA | 8965 |
| 1604 | CUGUUAAU G UGCCAGCU | 4169 | AGCTGGCA GGCTAGCTACAACGA ATTAACAG | 8966 |
| 1602 | GUUAAUGU G CCAGCUGC | 4170 | GCAGCTGG GGCTAGCTACAACGA ACATTAAC | 8967 |
| 1598 | AUGUGCCA G CUGCCGUU | 4171 | AACGGCAG GGCTAGCTACAACGA TGGCACAT | 8968 |
| 1595 | UGCCAGCU G CCGUUGGC | 4172 | ACCAACGG GGCTAGCTACAACGA AGCTGGCA | 8969 |
| 1592 | CAGCUGCC G UUGGUGUU | 4173 | AACACCAA GGCTAGCTACAACGA GGCAGCTG | 8970 |
| 1588 | UGCCGUUG G UGUUAAUA | 4174 | TATTAACA GGCTAGCTACAACGA CAACGGCA | 8971 |
| 1586 | CCGUUGGU G UUAAUAAG | 4175 | CTTATTAA GGCTAGCTACAACGA ACCAACGG | 8972 |
| 1582 | UGGUGUUA A UAAGCUGG | 4176 | CCAGCTTA GGCTAGCTACAACGA TAACACCA | 8973 |
| 1578 | GUUAAUAA G CUGGAUAU | 4177 | ATATCCAG GGCTAGCTACAACGA TTATTAAC | 8974 |
| 1573 | UAAGCUGG A UAUUCUGA | 4178 | TCAGAATA GGCTAGCTACAACGA CCAGCTTA | 8975 |
| 1571 | AGCUGGAU A UUCUGAGA | 4179 | TCTCAGAA GGCTAGCTACAACGA ATCCAGCT | 8976 |
| 1563 | AUUCUGAG A UGCUCCAG | 4180 | CTGGAGCA GGCTAGCTACAACGA CTCAGAAT | 8977 |
| 1561 | UCUGAGAU G CUCCAGAU | 4181 | ATCTGGAG GGCTAGCTACAACGA ATCTCAGA | 8978 |
| 1554 | UGCUCCAG A UGUAAAGA | 4182 | TCTTTACA GGCTAGCTACAACGA CTGGAGCA | 8979 |
| 1552 | CUCCAGAU G UAAAGAGG | 4183 | CCTCTTTA GGCTAGCTACAACGA ATCTGGAG | 8980 |
| 1542 | AAAGAGGG A UGCCACCC | 4184 | GGGTGGCA GGCTAGCTACAACGA CCCTCTTT | 8981 |
| 1540 | AGAGGGAU G CCACCCUA | 4185 | TAGGGTGG GGCTAGCTACAACGA ATCCCTCT | 8982 |
| 1537 | GGGAUGCC A CCCUACUA | 4186 | TAGTAGGG GGCTAGCTACAACGA GGCATCCC | 8983 |
| 1532 | GCCACCCU A CUAGUGGU | 4187 | ACCACTAG GGCTAGCTACAACGA AGGGTGGC | 8984 |
| 1528 | CCCUACUA G UGGUGUGG | 4188 | CCACACCA GGCTAGCTACAACGA TAGTAGGG | 8985 |
| 1525 | UACUAGUG G UGUGGCCC | 4189 | GGGCCACA GGCTAGCTACAACGA CACTAGTA | 8986 |
| 1523 | CUAGUGGU G UGGCCCUG | 4190 | CAGGGCCA GGCTAGCTACAACGA ACCACTAG | 8987 |
| 1520 | GUGGUGUG G CCCUGCGC | 4191 | GCGCAGGG GGCTAGCTACAACGA CACACCAC | 8988 |
| 1515 | GUGGCCCU G CGCCCCCC | 4192 | GGGGGGCG GGCTAGCTACAACGA AGGGCCAC | 8989 |
| 1513 | GGCCCUGC G CCCCCCCU | 4193 | AGGGGGGG GGCTAGCTACAACGA GCAGGGCC | 8990 |
| 1504 | CCCCCCCU G UCGUGUAG | 4194 | CTACACGA GGCTAGCTACAACGA AGGGGGGG | 8991 |
| 1501 | CCCCUGUC G UGUAGGUG | 4195 | CACCTACA GGCTAGCTACAACGA GACAGGGG | 8992 |
| 1499 | CCUGUCGU G UAGGUGUC | 4196 | GACACCTA GGCTAGCTACAACGA ACGACAGG | 8993 |
| 1495 | UCGUGUAG G UGUCCCCG | 4197 | CGGGGACA GGCTAGCTACAACGA CTACACGA | 8994 |
| 1493 | GUGUAGGU G UCCCCGUC | 4198 | GACGGGGA GGCTAGCTACAACGA ACCTACAC | 8995 |
| 1487 | GUGUCCCC G UCAACGCC | 4199 | GGCGTTGA GGCTAGCTACAACGA GGGGACAC | 8996 |
| 1483 | CCCCGUCA A CGCCGGCA | 4200 | TGCCGGCG GGCTAGCTACAACGA TGACGGGG | 8997 |
| 1481 | CCGUCAAC G CCGGCAAA | 4201 | TTTGCCGG GGCTAGCTACAACGA GTTGACGG | 8998 |
| 1477 | CAACGCCG G CAAAGAGU | 4202 | ACTCTTTG GGCTAGCTACAACGA CGGCGTTG | 8999 |
| 1470 | GGCAAAGA G UAGCAUCA | 4203 | TGATGCTA GGCTAGCTACAACGA TCTTTGCC | 9000 |
| 1467 | AAAGAGUA G CAUCACAA | 4204 | TTGTGATG GGCTAGCTACAACGA TACTCTTT | 9001 |
| 1465 | AGAGUAGC A UCACAAUC | 4205 | GATTGTGA GGCTAGCTACAACGA GCTACTCT | 9002 |
| 1462 | GUAGCAUC A CAAUCAAC | 4206 | GTTGATTG GGCTAGCTACAACGA GATGCTAC | 9003 |
| 1459 | GCAUCACA A UCAACACC | 4207 | GGTGTTGA GGCTAGCTACAACGA TGTGATGC | 9004 |
| 1455 | CACAAUCA A CACCUUAG | 4208 | CTAAGGTG GGCTAGCTACAACGA TGATTGTG | 9005 |
| 1453 | CAAUCAAC A CCUUAGCC | 4209 | GGCTAAGG GGCTAGCTACAACGA GTTGATTG | 9006 |
| 1447 | ACACCUUA G CCCAGUUC | 4210 | GAACTGGG GGCTAGCTACAACGA TAAGGTGT | 9007 |
| 1442 | UUAGCCCA G UUCCCCAC | 4211 | TTCCATGG GGCTAGCTACAACGA GGGGAACT | 9008 |
| 1435 | AGUUCCCC A CCAUGGAA | 4212 | TTCCATGG GGCTAGCTACAACGA GGGGAACT | 9009 |
| 1432 | UCCCCACC A UGGAAUAA | 4213 | TTATTCCA GGCTAGCTACAACGA GGTGGGGA | 9010 |
| 1427 | ACCAUGGA A UAAUAGGC | 4214 | GCCTATTA GGCTAGCTACAACGA TCCATGGT | 9011 |
| 1424 | AUGGAAUA A UAGGCAAG | 4215 | CTTGCCTA GGCTAGCTACAACGA TATTCCAT | 9012 |
| 1420 | AAUAAUAG G CAAGGCCC | 4216 | GGGCCTTG GGCTAGCTACAACGA CTATTATT | 9013 |
| 1415 | UAGGCAAG G CCCGCCAG | 4217 | CTGGCGGG GGCTAGCTACAACGA CTTGCCTA | 9014 |
| 1411 | CAAGGCCC G CCAGGACU | 4218 | AGTCCTGG GGCTAGCTACAACGA GGGCCTTG | 9015 |
| 1405 | CCGCCAGG A CUCCCCAG | 4219 | CTGGGGAG GGCTAGCTACAACGA CCTGGCGG | 9016 |
| 1397 | ACUCCCCA G UGGGCCCC | 4220 | GGGGCCCA GGCTAGCTACAACGA TGGGGAGT | 9017 |
| 1393 | CCCAGUGG G CCCCCGCC | 4221 | GGCGGGGG GGCTAGCTACAACGA CCACTGGG | 9018 |
| 1387 | GGGCCCCC G CCACCAUG | 4222 | CATGGTGG GGCTAGCTACAACGA GGGGGCCC | 9019 |
| 1384 | CCCCCGCC A CCAUGUCC | 4223 | GGACATGG GGCTAGCTACAACGA GGCGGGGG | 9020 |
| 1381 | CCGCCACC A UGUCCACG | 4224 | CGTGGACA GGCTAGCTACAACGA GGTGGCGG | 9021 |
| 1379 | GCCACCAU G UCCACGAC | 4225 | GTCGTGGA GGCTAGCTACAACGA ATGGTGGC | 9022 |
| 1375 | CCAUGUCC A CGACGGCU | 4226 | AGCCGTCG GGCTAGCTACAACGA GGACATGG | 9023 |
| 1372 | UGUCCACG A CGGCUUGU | 4227 | ACAAGCCG GGCTAGCTACAACGA CGTGGACA | 9024 |
| 1369 | CCACGACG G CUUGUGGG | 4228 | CCCACAAG GGCTAGCTACAACGA CGTCGTGG | 9025 |
| 1365 | GACGGCUU G UGGGAUCC | 4229 | GGATCCCA GGCTAGCTACAACGA AAGCCGTC | 9026 |
| 1360 | CUUGUGGG A UCCGGAGC | 4230 | GCTCCGGA GGCTAGCTACAACGA CCCACAAG | 9027 |
| 1353 | GAUCCGGA G CAACUGCG | 4231 | CGCAGTTG GGCTAGCTACAACGA TCCGGATC | 9028 |
| 1350 | CCGGAGCA A CUGCGAUA | 4232 | TATCGCAG GGCTAGCTACAACGA TGCTCCGG | 9029 |
| 1347 | GAGCAACU G CGAUACCA | 4233 | TGGTATCG GGCTAGCTACAACGA AGTTGCTC | 9030 |
| 1344 | CAACUGCG A UACCACUA | 4234 | TAGTGGTA GGCTAGCTACAACGA CGCAGTTG | 9031 |
| 1342 | ACUGCGAU A CCACUAGG | 4235 | CCTAGTGG GGCTAGCTACAACGA ATCGCAGT | 9032 |
| 1339 | GCGAUACC A CUAGGGCU | 4236 | AGCCCTAG GGCTAGCTACAACGA GGTATCGC | 9033 |
| 1333 | CCACUAGG G CUGUUGUA | 4237 | TACAACAG GGCTAGCTACAACGA CCTAGTGG | 9034 |
| 1330 | CUAGGGCU G UUGUAGGU | 4238 | ACCTACAA GGCTAGCTACAACGA AGCCCTAG | 9035 |
| 1327 | GGGCUGUU G UAGGUGAC | 4239 | GTCACCTA GGCTAGCTACAACGA AACAGCCC | 9036 |
| 1323 | UGUUGUAG G UGACCAAU | 4240 | ATTGGTCA GGCTAGCTACAACGA CTACAACA | 9037 |
| 1320 | UGUAGGUG A CCAAUUCA | 4241 | TGAATTGG GGCTAGCTACAACGA CACCTACA | 9038 |
| 1316 | GGUGACCA A UUCAUCAU | 4242 | ATGATGAA GGCTAGCTACAACGA TGGTCACC | 9039 |
| 1312 | ACCAAUUC A UCAUCAUA | 4243 | TATGATGA GGCTAGCTACAACGA GAATTGGT | 9040 |
| 1309 | AAUUCAUC A UCAUAUCC | 4244 | GGATATGA GGCTAGCTACAACGA GATGAATT | 9041 |
| 1306 | UCAUCAUC A UAUCCCAA | 4245 | TTGGGATA GGCTAGCTACAACGA GATGATGA | 9042 |
| 1304 | AUCAUCAU A UCCCAAGC | 4246 | GCTTGGGA GGCTAGCTACAACGA ATGATGAT | 9043 |
| 1297 | UAUCCCAA G CCAUGCGA | 4247 | TCGCATGG GGCTAGCTACAACGA TTGGGATA | 9044 |
| 1294 | CCCAAGCC A UGCGAUGG | 4248 | CCATCGCA GGCTAGCTACAACGA GGCTTGGG | 9045 |
| 1292 | CAAGCCAU G CGAUGGCC | 4249 | GGCCATCG GGCTAGCTACAACGA ATGGCTTG | 9046 |
| 1289 | GCCAUGCG A UGGCCUGA | 4250 | TCAGGCCA GGCTAGCTACAACGA CGCATGGC | 9047 |
| 1286 | AUGCGAUG G CCUGAUAC | 4251 | GTATCAGG GGCTAGCTACAACGA CATCGCAT | 9048 |
| 1281 | AUGGCCUG A UACGUGGC | 4252 | GCCACGTA GGCTAGCTACAACGA CAGGCCAT | 9049 |
| 1279 | GGCCUGAU A CGUGGCCG | 4253 | CGGCCACG GGCTAGCTACAACGA ATCAGGCC | 9050 |
| 1277 | CCUGAUAC G UGGCCGGG | 4254 | CCCGGCCA GGCTAGCTACAACGA GTATCAGG | 9051 |
| 1274 | GAUACGUG G CCGGGAUA | 4255 | TATCCCGG GGCTAGCTACAACGA CACGTATC | 9052 |
| 1268 | UGGCCGGG A UAGAUCGA | 4256 | TCGATCTA GGCTAGCTACAACGA CCCGGCCA | 9053 |
| 1264 | CGGGAUAG A UCGAGCAA | 4257 | TTGCTCGA GGCTAGCTACAACGA CTATCCCG | 9054 |
| 1259 | UAGAUCGA G CAAUUACA | 4258 | TGTAATTG GGCTAGCTACAACGA TCGATCTA | 9055 |
| 1256 | AUCGAGCA A UUACAGUC | 4259 | GACTGTAA GGCTAGCTACAACGA TGCTCGAT | 9056 |
| 1253 | GAGCAAUU A CAGUCCUG | 4260 | CAGGACTG GGCTAGCTACAACGA AATTGCTC | 9057 |
| 1250 | CAAUUACA G UCCUGUAC | 4261 | GTACAGGA GGCTAGCTACAACGA TGTAATTG | 9058 |
| 1245 | ACAGUCCU G UACUGUCU | 4262 | AGACAGTA GGCTAGCTACAACGA AGGACTGT | 9059 |
| 1243 | AGUCCUGU A CUGUCUCA | 4263 | TGAGACAG GGCTAGCTACAACGA ACAGGACT | 9060 |
| 1240 | CCUGUACU G UCUCAUAC | 4264 | GTATGAGA GGCTAGCTACAACGA AGTACAGG | 9061 |
| 1235 | ACUGUCUC A UACCGGCG | 4265 | CGCCGGTA GGCTAGCTACAACGA GAGACAGT | 9062 |
| 1233 | UGUCUCAU A CCGGCGAG | 4266 | CTCGCCGG GGCTAGCTACAACGA ATGAGACA | 9063 |
| 1229 | UCAUACCG G CGAGGCGA | 4267 | TCGCCTCG GGCTAGCTACAACGA CGGTATGA | 9064 |
| 1224 | CCGGCGAG G CGAGAAGG | 4268 | CCTTCTCG GGCTAGCTACAACGA CTCGCCGG | 9065 |
| 1216 | GCGAGAAG G UGAACAGC | 4269 | GCTGTTCA GGCTAGCTACAACGA CTTCTCGC | 9066 |
| 1212 | GAAGGUGA A CAGCUGAG | 4270 | CTCAGCTG GGCTAGCTACAACGA TCACCTTC | 9067 |
| 1209 | GGUGAACA G CUGAGAGA | 4271 | TCTCTCAG GGCTAGCTACAACGA TGTTCACC | 9068 |
| 1201 | GCUGAGAG A CGAGGAAG | 4272 | CTTCCTCG GGCTAGCTACAACGA CTCTCAGC | 9069 |
| 1192 | CGAGGAAG A CAGAUCCG | 4273 | CGGATCTG GGCTAGCTACAACGA CTTCCTCG | 9070 |
| 1188 | GAAGACAG A UCCGCAGA | 4274 | TCTGCGGA GGCTAGCTACAACGA CTGTCTTC | 9071 |
| 1184 | ACAGAUCC G CAGAGAUC | 4275 | GATCTCTG GGCTAGCTACAACGA GGATCTGT | 9072 |
| 1178 | CCGCAGAG A UCCCCCAC | 4276 | GTGGGGGA GGCTAGCTACAACGA CTCTGCCG | 9073 |
| 1171 | GAUCCCCC A CGUACAUA | 4277 | TATGTACG GGCTAGCTACAACGA GGGGGATC | 9074 |
| 1169 | UCCCCCAC G UACAUAGC | 4278 | GCTATGTA GGCTAGCTACAACGA GTGGGGGA | 9075 |
| 1167 | CCCCACGU A CAUAGCAG | 4279 | CTGCTATG GGCTAGCTACAACGA ACGTGGGG | 9076 |
| 1165 | CCACGUAC A UAGCAGAG | 4280 | CTCTGCTA GGCTAGCTACAACGA GTACGTGG | 9077 |
| 1162 | CGUACAUA G CAGAGCAG | 4281 | CTGCTCTG GGCTAGCTACAACGA TATGTACG | 9078 |
| 1157 | AUAGCAGA G CAGAAAGC | 4282 | GCTTTCTG GGCTAGCTACAACGA TCTGCTAT | 9079 |
| 1150 | AGCAGAAA G CAGCCGCC | 4283 | GGCGGCTG GGCTAGCTACAACGA TTTCTGCT | 9080 |
| 1147 | AGAAAGCA G CCGCCCCA | 4284 | TGGGGCGG GGCTAGCTACAACGA TGCTTTCT | 9081 |
| 1144 | AAGCAGCC G CCCCAACG | 4285 | CGTTGGGG GGCTAGCTACAACGA GGCTGCTT | 9082 |
| 1138 | CCGCCCCA A CGAGCAAA | 4286 | TTTGCTCG GGCTAGCTACAACGA TGGGGCGG | 9083 |
| 1134 | CCCAACGA G CAAAUCGA | 4287 | TCGATTTG GGCTAGCTACAACGA TCGTTGGG | 9084 |
| 1130 | ACGAGCAA A UCGACGUG | 4288 | CACGTCGA GGCTAGCTACAACGA TTGCTCGT | 9085 |
| 1126 | GCAAAUCG A CGUGACGC | 4289 | GCGTCACG GGCTAGCTACAACGA CGATTTGC | 9086 |
| 1124 | AAAUCGAC G UGACGCCG | 4290 | CGGCGTCA GGCTAGCTACAACGA GTCGATTT | 9087 |
| 1121 | UCGACGUG A CGCCGUAU | 4291 | ATACGGCG GGCTAGCTACAACGA CACGTCGA | 9088 |
| 1119 | GACGUGAC G CCGUAUCG | 4292 | CGATACGG GGCTAGCTACAACGA GTCACGTC | 9089 |
| 1116 | GUGACGCC G UAUCGUCG | 4293 | CGACGATA GGCTAGCTACAACGA GGCGTCAC | 9090 |
| 1114 | GACGCCGU A UCGUCGUA | 4294 | TACGACGA GGCTAGCTACAACGA ACGGCGTC | 9091 |
| 1111 | GCCGUAUC G UCGUAGUG | 4295 | CACTACGA GGCTAGCTACAACGA GATACGGC | 9092 |
| 1108 | GUAUCGUC G UAGUGGGG | 4296 | CCCCACTA GGCTAGCTACAACGA GACGATAC | 9093 |
| 1105 | UCGUCGUA G UGGGGAUG | 4297 | CATCCCCA GGCTAGCTACAACGA TACGACGA | 9094 |
| 1099 | UAGUGGGG A UGCUGGCA | 4298 | TGCCAGCA GGCTAGCTACAACGA CCCCACTA | 9095 |
| 1097 | GUGGGGAU G CUGGCAUU | 4299 | AATGCCAG GGCTAGCTACAACGA ATCCCCAC | 9096 |
| 1093 | GGAUGCUG G CAUUCCUG | 4300 | CAGGAATG GGCTAGCTACAACGA CAGCATCC | 9097 |
| 1091 | AUGCUGGC A UUCCUGGC | 4301 | GCCAGGAA GGCTAGCTACAACGA GCCAGCAT | 9098 |
| 1084 | CAUUCCUG G CCGCGAGC | 4302 | GCTCGCGG GGCTAGCTACAACGA CAGGAATG | 9099 |
| 1081 | UCCUGGCC G CGAGCGUG | 4303 | CACGCTCG GGCTAGCTACAACGA GGCCAGGA | 9100 |
| 1077 | GGCCGCGA G CGUGGGAG | 4304 | CTCCCACG GGCTAGCTACAACGA TCGCGGCC | 9101 |
| 1075 | CCGCGAGC G UGGGAGUG | 4305 | CACTCCCA GGCTAGCTACAACGA GCTCGCGG | 9102 |
| 1069 | GCGUGGGA G UGAGCGCU | 4306 | AGCGCTCA GGCTAGCTACAACGA TCCCACGC | 9103 |
| 1065 | GGGAGUGA G CGCUACCC | 4307 | GGGTAGCG GGCTAGCTACAACGA TCACTCCC | 9104 |
| 1063 | GAGUGAGC G CUACCCAG | 4308 | CTGGGTAG GGCTAGCTACAACGA GCTCACTC | 9105 |
| 1060 | UGAGCGCU A CCCAGCAG | 4309 | CTGCTGGG GGCTAGCTACAACGA AGCGCTCA | 9106 |
| 1055 | GCUACCCA G CAGCGGGA | 4310 | TCCCGCTG GGCTAGCTACAACGA TGGGTAGC | 9107 |
| 1052 | ACCCAGCA G CGGGAGGA | 4311 | TCCTCCCG GGCTAGCTACAACGA TGCTGGGT | 9108 |
| 1043 | CGGGAGGA G UUGUUCUC | 4312 | GAGAACAA GGCTAGCTACAACGA TCCTCCCG | 9109 |
| 1040 | GAGGAGUU G UUCUCCCG | 4313 | CGGGAGAA GGCTAGCTACAACGA AACTCCTC | 9110 |
| 1030 | UCUCCCGA A CGCAGGGC | 4314 | GCCCTGCG GGCTAGCTACAACGA TCGGGAGA | 9111 |
| 1028 | UCCCGAAC G CAGGGCAC | 4315 | GTGCCCTG GGCTAGCTACAACGA GTTCGGGA | 9112 |
| 1023 | AACGCAGG G CACGCACC | 4316 | GGTGCGTG GGCTAGCTACAACGA CCTGCGTT | 9113 |
| 1021 | CGCAGGGC A CGCACCCC | 4317 | GGGGTGCG GGCTAGCTACAACGA GCCCTGCG | 9114 |
| 1019 | CAGGGCAC G CACCCCGG | 4318 | CCGGGGTG GGCTAGCTACAACGA GTGCCCTG | 9115 |
| 1017 | GGGCACGC A CCCCGGGG | 4319 | CCCCGGGG GGCTAGCTACAACGA GCGTGCCC | 9116 |
| 1009 | ACCCCGGG G UGUGCAUG | 4320 | CATCGACA GGCTAGCTACAACGA CCCGGGGT | 9117 |
| 1007 | CCCGGGGU G UGCAUGAU | 4321 | ATCATGCA GGCTAGCTACAACGA ACCCCGGG | 9118 |
| 1005 | CGGGGUGU G CAUGAUCA | 4322 | TGATCATG GGCTAGCTACAACGA ACACCCCG | 9119 |
| 1003 | GGGUGUGC A UGAUCAUG | 4323 | CATGATCA GGCTAGCTACAACGA GCACACCC | 9120 |
| 1000 | UGUGCAUG A UCAUGUCC | 4324 | GGACATGA GGCTAGCTACAACGA CATGCACA | 9121 |
| 997 | GCAUGAUC A UGUCCUCU | 4325 | AGAGGACA GGCTAGCTACAACGA GATCATGC | 9122 |
| 995 | AUGAUCAU G UCCUCUGC | 4326 | GCAGAGGA GGCTAGCTACAACGA ATGATCAT | 9123 |
| 988 | UGUCCUCU G CCUCAUAC | 4327 | GTATGAGG GGCTAGCTACAACGA AGAGGACA | 9124 |
| 983 | UCUGCCUC A UACACAAU | 4328 | ATTGTGTA GGCTAGCTACAACGA GAGGCAGA | 9125 |
| 981 | UGCCUCAU A CACAAUGC | 4329 | GCATTGTG GGCTAGCTACAACGA ATGAGGCA | 9128 |
| 979 | CCUCAUAC A CAAUGCUU | 4330 | AAGCATTG GGCTAGCTACAACGA GTATGAGG | 9127 |
| 976 | CAUACACA A UGCUUGAG | 4331 | CTCAAGCA GGCTAGCTACAACGA TGTGTATG | 9128 |
| 974 | UACACAAU G CUUGAGUU | 4332 | AACTCAAG GGCTAGCTACAACGA ATTGTGTA | 9129 |
| 968 | AUGCUUGA G UUGGAGCA | 4333 | TGCTCCAA GGCTAGCTACAACGA TCAAGCAT | 9130 |
| 962 | GAGUUGGA G CAAUCGUU | 4334 | AACGATTG GGCTAGCTACAACGA TCCAACTC | 9131 |
| 959 | UUGGAGCA A UCGUUCGU | 4335 | ACGAACGA GGCTAGCTACAACGA TGCTCCAA | 9132 |
| 956 | GAGCAAUC G UUCGUGAC | 4336 | GTCACGAA GGCTAGCTACAACGA GATTGCTC | 9133 |
| 952 | AAUCGUUC G UGACAUGG | 4337 | CCATGTCA GGCTAGCTACAACGA GAACGATT | 9134 |
| 949 | CGUUCGUG A CAUGGUAC | 4338 | GTACCATG GGCTAGCTACAACGA CACGAACG | 9135 |
| 947 | UUCGUGAC A UGGUACAG | 4339 | CTGTACCA GGCTAGCTACAACGA GTCACGAA | 9136 |
| 944 | GUGACAUG G UACAGCCC | 4340 | GGGCTGTA GGCTAGCTACAACGA CATGTCAC | 9137 |
| 942 | GACAUGGU A CAGCCCGG | 4341 | CCGGGCTG GGCTAGCTACAACGA ACCATGTC | 9138 |
| 939 | AUGGUACA G CCCGGACG | 4342 | CGTCCGGG GGCTAGCTACAACGA TGTACCAT | 9139 |
| 933 | CAGCCCGG A CGCGUUGC | 4343 | GCAACGCG GGCTAGCTACAACGA CCGGGCTG | 9140 |
| 931 | GCCCGGAC G CGUUGCAC | 4344 | GTGCAACG GGCTAGCTACAACGA GTCCGGGC | 9141 |
| 929 | CCGGACGC G UUGCACAC | 4345 | GTGTGCAA GGCTAGCTACAACGA GCGTCCGG | 9142 |
| 926 | GACGCGUU G CACACCUC | 4346 | GAGGTGTG GGCTAGCTACAACGA AACGCGTC | 9143 |
| 924 | CGCGUUGC A CACCUCAU | 4347 | ATGAGGTG GGCTAGCTACAACGA GCAACGCG | 9144 |
| 922 | CGUUGCAC A CCUCAUAA | 4348 | TTATGAGG GGCTAGCTACAACGA GTGCAACG | 9145 |
| 917 | CACACCUC A UAAGCGGA | 4349 | TCCGCTTA GGCTAGCTACAACGA GAGGTGTG | 9146 |
| 913 | CCUCAUAA G CGGAGGCU | 4350 | AGCCTCCG GGCTAGCTACAACGA TTATGAGG | 9147 |
| 907 | AAGCGGAG G CUGGGAUG | 4351 | CATCCCAG GGCTAGCTACAACGA CTCCGCTT | 9148 |
| 901 | AGGCUGGG A UGGUCAGA | 4352 | TCTGACCA GGCTAGCTACAACGA CCCAGCCT | 9149 |
| 898 | CUGGGAUG G UCAGACAG | 4353 | CTGTCTGA GGCTAGCTACAACGA CATCCCAG | 9150 |
| 893 | AUGGUCAG A CAGGGCAG | 4354 | CTGCCCTG GGCTAGCTACAACGA CTGACCAT | 9151 |
| 888 | CAGACAGG G CAGCAGAG | 4355 | CTCTGCTG GGCTAGCTACAACGA CCTGTCTG | 9152 |
| 885 | ACAGGGCA G CAGAGCCA | 4356 | TGGCTCTG GGCTAGCTACAACGA TGCCCTGT | 9153 |
| 880 | GCAGCAGA G CCAAGAGG | 4357 | CCTCTTGG GGCTAGCTACAACGA TCTGCTGC | 9154 |
| 868 | AGAGGAAG A UAGAGAAA | 4358 | TTTCTCTA GGCTAGCTACAACGA CTTCCTCT | 9155 |
| 857 | GAGAAAGA G CAACCGGG | 4359 | CCCGGTTG GGCTAGCTACAACGA TCTTTCTC | 9156 |
| 854 | AAAGAGCA A CCGGGCAG | 4360 | CTGCCCGG GGCTAGCTACAACGA TGCTCTTT | 9157 |
| 849 | GCAACCGG G CAGAUUCC | 4361 | GGAATCTG GGCTAGCTACAACGA CCGGTTGC | 9158 |
| 845 | CCGGGCAG A UUCCCUGU | 4362 | ACAGGGAA GGCTAGCTACAACGA CTGCCCGG | 9159 |
| 838 | GAUUCCCU G UUGCAUAG | 4363 | CTATGCAA GGCTAGCTACAACGA AGGGAATC | 9160 |
| 835 | UCCCUGUU G CAUAGUUC | 4364 | GAACTATG GGCTAGCTACAACGA AACAGGGA | 9161 |
| 833 | CCUGUUGC A UAGUUCAC | 4365 | GTGAACTA GGCTAGCTACAACGA GCAACAGG | 9162 |
| 830 | GUUGCAUA G UUCACGCC | 4366 | GGCGTGAA GGCTAGCTACAACGA TATGCAAC | 9163 |
| 826 | CAUAGUUC A CGCCGUCU | 4367 | AGACGGCG GGCTAGCTACAACGA GAACTATG | 9164 |
| 824 | UAGUUCAC G CCGUCUUC | 4368 | GAAGACGG GGCTAGCTACAACGA GTGAACTA | 9165 |
| 821 | UUCACGCC G UCUUCCAG | 4369 | CTGGAAGA GGCTAGCTACAACGA GGCGTGAA | 9166 |
| 811 | CUUCCAGA A CCCGGACG | 4370 | CGTCCGGG GGCTAGCTACAACGA TCTGGAAG | 9167 |
| 805 | GAACCCGG A CGCCAUGC | 4371 | GCATGGCG GGCTAGCTACAACGA CCGGGTTC | 9168 |
| 803 | ACCCGGAC G CCAUGCGC | 4372 | GCGCATGG GGCTAGCTACAACGA GTCCGGGT | 9169 |
| 800 | CGGACGCC A UGCGCCAG | 4373 | CTGGCGCA GGCTAGCTACAACGA GGCGTCCG | 9170 |
| 798 | GACGCCAU G CGCCAGGG | 4374 | CCCTGGCG GGCTAGCTACAACGA ATGGCGTC | 9171 |
| 796 | CGCCAUGC G CCAGGGCC | 4375 | GGCCCTGG GGCTAGCTACAACGA GCATGGCG | 9172 |
| 790 | GCGCCAGG G CCCUGGCA | 4376 | TGCCAGGG GGCTAGCTACAACGA CCTGGCGC | 9173 |
| 784 | GGGCCCUG G CAGUGCCU | 4377 | AGGCACTG GGCTAGCTACAACGA CAGGGCCC | 9174 |
| 781 | CCCUGGCA G UGCCUCCC | 4378 | GGGAGGCA GGCTAGCTACAACGA TGCCAGGG | 9175 |
| 779 | CUGGCAGU G CCUCCCAA | 4379 | TTGGGAGG GGCTAGCTACAACGA ACTGCCAG | 9176 |
| 766 | CCAAGGGG G CGCCGACG | 4380 | CGTCGGCG GGCTAGCTACAACGA CCCCTTGG | 9177 |
| 764 | AAGGGGGC G CCGACGAG | 4381 | CTCGTCGG GGCTAGCTACAACGA GCCCCCTT | 9178 |
| 760 | GGGCGCCG A CGAGCGGA | 4382 | TCCGCTCG GGCTAGCTACAACGA CGGCGCCC | 9179 |
| 756 | GCCGACGA G CGGAAUGU | 4383 | ACATTCCG GGCTAGCTACAACGA TCGTCGGC | 9180 |
| 751 | CGAGCGGA A UGUACCCC | 4384 | GGGGTACA GGCTAGCTACAACGA TCCGCTCG | 9181 |
| 749 | AGCGGAAU G UACCCCAU | 4385 | ATGGGGTA GGCTAGCTACAACGA ATTCCGCT | 9182 |
| 747 | CGGAAUGU A CCCCAUGA | 4386 | TCATGGGG GGCTAGCTACAACGA ACATTCCG | 9183 |
| 742 | UGUACCCC A UGAGGUCG | 4387 | CGACCTCA GGCTAGCTACAACGA GGGGTACA | 9184 |
| 737 | CCCAUGAG G UCGGCGAA | 4388 | TTCGCCGA GGCTAGCTACAACGA CTCATGGG | 9185 |
| 733 | UGAGGUCG G CGAAGCCG | 4389 | CGGCTTCG GGCTAGCTACAACGA CGACCTCA | 9186 |
| 728 | UCGGCGAA G CCGCAUGU | 4390 | ACATGCGG GGCTAGCTACAACGA TTCGCCGA | 9187 |
| 725 | GCGAAGCC G CAUGUGAG | 4391 | CTCACATG GGCTAGCTACAACGA GGCTTCGC | 9188 |
| 723 | GAAGCCGC A UGUGAGGG | 4392 | CCCTCACA GGCTAGCTACAACGA GCGGCTTC | 9189 |
| 721 | AGCCGCAU G UGAGGGUA | 4393 | TACCCTCA GGCTAGCTACAACGA ATGCGGCT | 9190 |
| 715 | AUGUGAGG G UAUCGAUG | 4394 | CATCGATA GGCTAGCTACAACGA CCTCACAT | 9191 |
| 713 | GUGAGGGU A UCGAUGAC | 4395 | GTCATCGA GGCTAGCTACAACGA ACCCTCAC | 9192 |
| 709 | GGGUAUCG A UGACCUUA | 4396 | TAAGGTCA GGCTAGCTACAACGA CGATACCC | 9193 |
| 706 | UAUCGAUG A CCUUACCC | 4397 | GGGTAAGG GGCTAGCTACAACGA CATCGATA | 9194 |
| 701 | AUGACCUU A CCCAAGUU | 4398 | AACTTGGG GGCTAGCTACAACGA AAGGTCAT | 9195 |
| 695 | UUACCCAA G UUACGCGA | 4399 | TCGCGTAA GGCTAGCTACAACGA TTGGGTAA | 9196 |
| 692 | CCCAAGUU A CGCGACCU | 4400 | AGGTCGCG GGCTAGCTACAACGA AACTTGGG | 9197 |
| 690 | CAAGUUAC G CGACCUAC | 4401 | GTAGGTCG GGCTAGCTACAACGA GTAACTTG | 9198 |
| 687 | GUUACGCG A CCUACGCC | 4402 | GGCGTAGG GGCTAGCTACAACGA CGCGTAAC | 9199 |
| 683 | CGCGACCU A CGCCGGGG | 4403 | CCCCGGCG GGCTAGCTACAACGA AGGTCGCG | 9200 |
| 681 | CGACCUAC G CCGGGGGU | 4404 | ACCCCCGG GGCTAGCTACAACGA GTAGGTCG | 9201 |
| 674 | CGCCGGGG G UCCGUGGG | 4405 | CCCACGGA GGCTAGCTACAACGA CCCCGGCG | 9202 |
| 670 | GGGGGUCC G UGGGGCCC | 4406 | GGGCCCCA GGCTAGCTACAACGA GGACCCCC | 9203 |
| 665 | UCCGUGGG G CCCCAACU | 4407 | AGTTGGGG GGCTAGCTACAACGA CCCACGGA | 9204 |
| 659 | GGGCCCCA A CUAGGCCG | 4408 | CGGCCTAG GGCTAGCTACAACGA TGGGGCCC | 9205 |
| 654 | CCAACUAG G CCGGGAGC | 4409 | GCTCCCGG GGCTAGCTACAACGA CTAGTTGG | 9206 |
| 647 | GGCCGGGA G CCGCGGGG | 4410 | CCCCGCGG GGCTAGCTACAACGA TCCCGGCC | 9207 |
| 644 | CGGGAGCC G CGGGGUGA | 4411 | TCACCCCG GGCTAGCTACAACGA GGCTCCCG | 9208 |
| 639 | GCCGCGGG G UGACAGGA | 4412 | TCCTGTCA GGCTAGCTACAACGA CCCGCGGC | 9209 |
| 636 | GCGGGGUG A CAGGAGCC | 4413 | GGCTCCTG GGCTAGCTACAACGA CACCCCGC | 9210 |
| 630 | UGACAGGA G CCAUCCUG | 4414 | CAGGATGG GGCTAGCTACAACGA TCCTGTCA | 9211 |
| 627 | CAGGAGCC A UCCUGCCC | 4415 | GGGCAGGA GGCTAGCTACAACGA GGCTCCTG | 9212 |
| 622 | GCCAUCCU G CCCACCCU | 4416 | AGGGTGGG GGCTAGCTACAACGA AGGATGGC | 9213 |
| 618 | UCCUGCCC A CCCUAAGC | 4417 | GCTTAGGG GGCTAGCTACAACGA GGGCAGGA | 9214 |
| 611 | CACCCUAA G CCCUCAUU | 4418 | AATGAGGG GGCTAGCTACAACGA TTAGGGTG | 9215 |
| 605 | AAGCCCUC A UUGCCAUA | 4419 | TATGGCAA GGCTAGCTACAACGA GAGGGCTT | 9216 |
| 602 | CCCUCAUU G CCAUAGAG | 4420 | CTCTATGG GGCTAGCTACAACGA AATGAGGG | 9217 |
| 599 | UCAUUGCC A UAGAGGGG | 4421 | CCCCTCTA GGCTAGCTACAACGA GGCAATGA | 9218 |
| 591 | AUAGAGGG G CCAAGGGU | 4422 | ACCCTTGG GGCTAGCTACAACGA CCCTCTAT | 9219 |
| 584 | GGCCAAGG G UACCCGGG | 4423 | CCCGGGTA GGCTAGCTACAACGA CCTTGGCC | 9220 |
| 582 | CCAAGGGU A CCCGGGCU | 4424 | AGCCCGGG GGCTAGCTACAACGA ACCCTTGG | 9221 |
| 576 | GUACCCGG G CUGAGCCC | 4425 | GGGCTCAG GGCTAGCTACAACGA CCGGGTAC | 9222 |
| 571 | CGGGCUGA G CCCAGGCC | 4426 | GGCCTGGG GGCTAGCTACAACGA TCAGCCCG | 9223 |
| 565 | GAGCCCAG G CCCUGCCC | 4427 | GGGCAGGG GGCTAGCTACAACGA CTGGGCTC | 9224 |
| 560 | CAGGCCCU G CCCUCGGG | 4428 | CCCGAGGG GGCTAGCTACAACGA AGGGCCTG | 9225 |
| 552 | GCCCUCGG G CCGGCGAG | 4429 | CTCGCCGG GGCTAGCTACAACGA CCGAGGGC | 9226 |
| 548 | UCGGGCCG G CGAGCCUU | 4430 | AAGGCTCG GGCTAGCTACAACGA CGGCCCGA | 9227 |
| 544 | GCCGGCGA G CCUUGGGG | 4431 | CCCCAAGG GGCTAGCTACAACGA TCGCCGGC | 9228 |
| 535 | CCUUGGGG A UAGGUUGU | 4432 | ACAACCTA GGCTAGCTACAACGA CCCCAAGG | 9229 |
| 531 | GGGGAUAG G UUGUCGCC | 4433 | GGCGACAA GGCTAGCTACAACGA CTATCCCC | 9230 |
| 528 | GAUAGGUU G UCGCCUUC | 4434 | GAAGGCGA GGCTAGCTACAACGA AACCTATC | 9231 |
| 525 | AGGUUGUC G CCUUCCAC | 4435 | GTGGAAGG GGCTAGCTACAACGA GACAACCT | 9232 |
| 518 | CGCCUUCC A CGAGGUUG | 4436 | GAACCTCG GGCTAGCTACAACGA GGAAGGCG | 9233 |
| 513 | UCCACGAG G UUGCGACC | 4437 | GGTCGCAA GGCTAGCTACAACGA CTCGTGGA | 9234 |
| 510 | ACGAGGUU G CGACCGCU | 4438 | AGCGGTCG GGCTAGCTACAACGA AACCTCGT | 9235 |
| 507 | AGGUUGCG A CCGCUCGG | 4439 | CCGAGCCG GGCTAGCTACAACGA CGCAACCT | 9236 |
| 504 | UUGCGACC G CUCGGAAG | 4440 | CTTCCGAG GGCTAGCTACAACGA GGTCGCAA | 9237 |
| 496 | GCUCGGAA G UCUUCCUA | 4441 | TAGGAAGA GGCTAGCTACAACGA TTCCGAGC | 9238 |
| 487 | UCUUCCUA G UCGCGCGC | 4442 | GCGCGCGA GGCTAGCTACAACGA TAGGAAGA | 9239 |
| 484 | UCCAUGUC G CGCGCACA | 4443 | TGTGCGCG GGCTAGCTACAACGA GACTAGGA | 9240 |
| 482 | CUAGUCGC G CGCACACC | 4444 | GGTGTGCG GGCTAGCTACAACGA GCGACTAG | 9241 |
| 480 | AGUCGCGC G CACACCCA | 4445 | TGGGTGTG GGCTAGCTACAACGA GCGCGACT | 9242 |
| 478 | UCGCGCGC A CACCCAAC | 4446 | GTTGGGTG GGCTAGCTACAACGA GCGCGCGA | 9243 |
| 476 | GCGCGCAC A CCCAACCU | 4447 | AGGTTGGG GGCTAGCTACAACGA GTGCGCGC | 9244 |
| 471 | CACACCCA A CCUGGGGC | 4448 | GCCCCAGG GGCTAGCTACAACGA TGGGTGTG | 9245 |
| 464 | AACCUGGG G CCCCUGCG | 4449 | CGCAGGGG GGCTAGCTACAACGA CCCAGGTT | 9246 |
| 458 | GGGCCCCU G CGCGGCAA | 4450 | TTGCCGCG GGCTAGCTACAACGA AGGGGCCC | 9247 |
| 456 | GCCCCUGC G CGGCAACA | 4451 | TGTTGCCG GGCTAGCTACAACGA GCAGGGGC | 9248 |
| 453 | CCUGCGCG G CAACAGGU | 4452 | ACCTGTTG GGCTAGCTACAACGA CGCGCAGG | 9249 |
| 450 | GCGCGGCA A CAGGUAAA | 4453 | TTTACCTG GGCTAGCTACAACGA TGCCGCGC | 9250 |
| 446 | GGCAACAG G UAAACUCC | 4454 | GGAGTTTA GGCTAGCTACAACGA CTGTTGCC | 9251 |
| 442 | ACAGGUAA A CUCCACCA | 4455 | TGGTGGAG GGCTAGCTACAACGA TTACCTGT | 9252 |
| 437 | UAAACUCC A CCAACGAU | 4456 | ATCGTTGG GGCTAGCTACAACGA GGAGTTTA | 9253 |
| 433 | CUCCACCA A CGAUCUGA | 4457 | TCAGATCG GGCTAGCTACAACGA TGGTGGAG | 9254 |
| 430 | CACCAACG A UCUGACCA | 4458 | TGGTCAGA GGCTAGCTACAACGA CGTTGGTG | 9255 |
| 425 | ACGAUCUG A CCACCGCC | 4459 | GGCGGTGG GGCTAGCTACAACGA CAGATCGT | 9256 |
| 422 | AUCUGACC A CCGCCCGG | 4460 | CCGGGCGG GGCTAGCTACAACGA GGTCAGAT | 9257 |
| 419 | UGACCACC G CCCGGGAA | 4461 | TTCCCGGG GGCTAGCTACAACGA GGTGGTCA | 9258 |
| 411 | GCCCGGGA A CUUGACGU | 4462 | ACGTCAAG GGCTAGCTACAACGA TCCCGGGC | 9259 |
| 406 | GGAACUUG A CGUCCUGU | 4463 | ACAGGACG GGCTAGCTACAACGA CAAGTTCC | 9260 |
| 404 | AACUUGAC G UCCUGUGG | 4464 | CCACAGGA GGCTAGCTACAACGA GTCAAGTT | 9261 |
| 399 | GACGUCCU G UGGGCGGC | 4465 | GCCGCCCA GGCTAGCTACAACGA AGGACGTC | 9262 |
| 395 | UCCUGUGG G CGGCGGUU | 4466 | AACCGCCG GGCTAGCTACAACGA CCACAGGA | 9263 |
| 392 | UGUGGGCG G CGGUUGGU | 4467 | ACCAACCG GGCTAGCTACAACGA CGCCCACA | 9264 |
| 389 | GGGCGGCG G UUGGUGUU | 4468 | AACACCAA GGCTAGCTACAACGA CGCCGCCC | 9265 |
| 385 | GGCGGUUG G UGUUACGU | 4469 | ACGTAACA GGCTAGCTACAACGA CAACCGCC | 9266 |
| 383 | CGGUUGGU G UUACGUUU | 4470 | AAACGTAA GGCTAGCTACAACGA ACCAACCG | 9267 |
| 380 | UUGGUGUU A CGUUUGGU | 4471 | ACCAAACG GGCTAGCTACAACGA AACACCAA | 9268 |
| 378 | GGUGUUAC G UUUGGUUU | 4472 | AAACCAAA GGCTAGCTACAACGA GTAACACC | 9269 |
| 373 | UACGUUUG G UUUUUCUU | 4473 | AAGAAAAA GGCTAGCTACAACGA CAAACGTA | 9270 |
| 360 | UCUUUGAG G UUUAGGAU | 4474 | ATCCTAAA GGCTAGCTACAACGA CTCAAAGA | 9271 |
| 353 | GGUUUAGG A UUCGUGCU | 4475 | AGCACGAA GGCTAGCTACAACGA CCTAAACC | 9272 |
| 349 | UAGGAUUC G UGCUCAUG | 4476 | CATGAGCA GGCTAGCTACAACGA GAATCCTA | 9273 |
| 347 | GGAUUCGU G CUCAUGGU | 4477 | ACCATGAG GGCTAGCTACAACGA ACGAATCC | 9274 |
| 343 | UCGUGCUC A UGGUGCAC | 4478 | GTGCACCA GGCTAGCTACAACGA GAGCACGA | 9275 |
| 340 | UGCUCAUG G UGCACGGU | 4479 | ACCGTGCA GGCTAGCTACAACGA CATGAGCA | 9276 |
| 338 | CUCAUGGU G CACGGUCU | 4480 | AGACCGTG GGCTAGCTACAACGA ACCATGAG | 9277 |
| 336 | CAUGGUGC A CGGUCUAC | 4481 | GTAGACCG GGCTAGCTACAACGA GCACCATG | 9278 |
| 333 | GGUGCACG G UCUACGAG | 4482 | CTCGTAGA GGCTAGCTACAACGA CGTGCACC | 9279 |
| 329 | CACGGUCU A CGAGACCU | 4483 | AGGTCTCG GGCTAGCTACAACGA AGACCGTG | 9280 |
| 324 | UCUACGAG A CCUCCCGG | 4484 | CCGGGAGG GGCTAGCTACAACGA CTCGTAGA | 9281 |
| 314 | CUCCCGGG G CACUCGCA | 4485 | TGCGAGTG GGCTAGCTACAACGA CCCGGGAG | 9282 |
| 312 | CCCGGGGC A CUCGCAAG | 4486 | CTTGCGAG GGCTAGCTACAACGA GCCCCGGG | 9283 |
| 308 | GGGCACUC G CAAGCACC | 4487 | GGTGCTTG GGCTAGCTACAACGA GAGTGCCC | 9284 |
| 304 | ACUCGCAA G CACCCUAU | 4488 | ATAGGGTG GGCTAGCTACAACGA TTGCGAGT | 9285 |
| 302 | UCGCAAGC A CCCUAUCA | 4489 | TGATAGGG GGCTAGCTACAACGA GCTTGCGA | 9286 |
| 297 | AGCACCCU A UCAGGCAG | 4490 | CTGCCTGA GGCTAGCTACAACGA AGGGTGCT | 9287 |
| 292 | CCUAUCAG G CAGUACCA | 4491 | TGGTACTG GGCTAGCTACAACGA CTGATAGG | 9288 |
| 289 | AUCAGGCA G UACCACAA | 4492 | TTGTGGTA GGCTAGCTACAACGA TGCCTGAT | 9289 |
| 287 | CAGGCAGU A CCACAAGG | 4493 | CCTTGTGG GGCTAGCTACAACGA ACTGCCTG | 9290 |
| 284 | GCAGUACC A CAAGGCCU | 4494 | AGGCCTTG GGCTAGCTACAACGA GGTACTGC | 9291 |
| 279 | ACCACAAG G CCUUUCGC | 4495 | GCGAAAGG GGCTAGCTACAACGA CTTGTGGT | 9292 |
| 272 | GGCCUUUC G CGACCCAA | 4496 | TTGGGTCG GGCTAGCTACAACGA GAAAGGCC | 9293 |
| 269 | CUUUCGCG A CCCAACAC | 4497 | GTGTTGGG GGCTAGCTACAACGA CGCGAAAG | 9294 |
| 264 | GCGACCCA A CACUACUC | 4498 | GAGTAGTG GGCTAGCTACAACGA TGGGTCGC | 9295 |
| 262 | GACCCAAC A CUACUCGG | 4499 | CCGAGTAG GGCTAGCTACAACGA GTTGGGTC | 9296 |
| 259 | CCAACACU A CUCGGCUA | 4500 | TAGCCGAG GGCTAGCTACAACGA AGTGTTGG | 9297 |
| 254 | ACUACUCG G CUAGCAGU | 4501 | ACTGCTAG GGCTAGCTACAACGA CGAGTAGT | 9298 |
| 250 | CUCGGCUA G CAGUCUCG | 4502 | CGAGACTG GGCTAGCTACAACGA TAGCCGAG | 9299 |
| 247 | GGCUAGCA G UCUCGCGG | 4503 | CCGCGAGA GGCTAGCTACAACGA TGCTAGCC | 9300 |
| 242 | GCAGUCUC G CGGGGGCA | 4504 | TGCCCCCG GGCTAGCTACAACGA GAGACTGC | 9301 |
| 236 | UCGCGGGG G CACGCCCA | 4505 | TGGGCGTG GGCTAGCTACAACGA CCCCGCGA | 9302 |
| 234 | GCGGGGGC A CGCCCAAA | 4506 | TTTGGGCG GGCTAGCTACAACGA GCCCCCGC | 9303 |
| 232 | GGGGGCAC G CCCAAAUC | 4507 | GATTTGGG GGCTAGCTACAACGA GTGCCCCC | 9304 |
| 226 | ACGCCCAA A UCUCCAGG | 4508 | CCTGGAGA GGCTAGCTACAACGA TTGGGCGT | 9305 |
| 218 | AUCUCCAG G CAUUGAGC | 4509 | GCTCAATG GGCTAGCTACAACGA CTGGAGAT | 9306 |
| 216 | CUCCAGGC A UUGAGCGG | 4510 | CCGCTCAA GGCTAGCTACAACGA GCCTGGAG | 9307 |
| 211 | GGCAUUGA G CGGGUUGA | 4511 | TCAACCCG GGCTAGCTACAACGA TCAATGCC | 9308 |
| 207 | UUGAGCGG G UUGAUCCA | 4512 | TGGATCCA GGCTAGCTACAACGA CCGCTCAA | 9309 |
| 203 | GCGGGUUG A UCCAAGAA | 4513 | TTCTTGGA GGCTAGCTACAACGA CAACCCGC | 9310 |
| 191 | AAGAAAGG A CCCGGUCG | 4514 | CGACCGGG GGCTAGCTACAACGA CCTTTCTT | 9311 |
| 186 | AGGACCCG G UCGUCCUG | 4515 | CAGGACGA GGCTAGCTACAACGA CGGGTCCT | 9312 |
| 183 | ACCCGGUC G UCCUGGCA | 4516 | TGCCAGGA GGCTAGCTACAACGA GACCGGGT | 9313 |
| 177 | UCGUCCUG G CAAUUCCG | 4517 | CGGAATTG GGCTAGCTACAACGA CAGGACGA | 9314 |
| 174 | UCCUGGCA A UUCCGGUG | 4518 | CACCGGAA GGCTAGCTACAACGA TGCCAGGA | 9315 |
| 168 | CAAUUCCG G UGUACUCA | 4519 | TGAGTACA GGCTAGCTACAACGA CGGAATTG | 9316 |
| 166 | AUUCCGGU G UACUCACC | 4520 | GGTGAGTA GGCTAGCTACAACGA ACCGGAAT | 9317 |
| 164 | UCCGGUGU A CUCACCGG | 4521 | CCGGTGAG GGCTAGCTACAACGA ACACCGGA | 9318 |
| 160 | GUGUACUC A CCGGUUCC | 4522 | GGAACCGG GGCTAGCTACAACGA GAGTACAC | 9319 |
| 156 | ACUCACCG G UUCCGCAG | 4523 | CTGCGGAA GGCTAGCTACAACGA CGGTGAGT | 9320 |
| 151 | CCGGUUCC G CAGACCAC | 4524 | GTGGTCTG GGCTAGCTACAACGA GGAACCGG | 9321 |
| 147 | UUCCGCAG A CCACUAUG | 4525 | CATAGTGG GGCTAGCTACAACGA CTGCGGAA | 9322 |
| 144 | CGCAGACC A CUAUGGCU | 4526 | AGCCATAG GGCTAGCTACAACGA GGTCTGCG | 9323 |
| 141 | AGACCACU A UGGCUCUC | 4527 | GAGAGCCA GGCTAGCTACAACGA AGTGGTCT | 9324 |
| 138 | CCACUAUG G CUCUCCCG | 4528 | CGGGAGAG GGCTAGCTACAACGA CATAGTGG | 9325 |
| 120 | GAGGGGGG G UCCUGGAG | 4529 | CTCCAGGA GGCTAGCTACAACGA CCCCCCTC | 9326 |
| 111 | UCCUGGAG G CUGCACGA | 4530 | TCGTGCAG GGCTAGCTACAACGA CTCCAGGA | 9327 |
| 108 | UGGAGGCU G CACGACAC | 4531 | GTGTCGTG GGCTAGCTACAACGA AGCCTCCA | 9328 |
| 106 | GAGGCUGC A CGACACUC | 4532 | GAGTGTCG GGCTAGCTACAACGA GCAGCCTC | 9329 |
| 103 | GCUGCACG A CACUCAUA | 4533 | TATGAGTG GGCTAGCTACAACGA CGTGCAGC | 9330 |
| 101 | UGCACGAC A CUCAUACU | 4534 | AGTATGAG GGCTAGCTACAACGA GTCGTGCA | 9331 |
| 97 | CGACACUC A UACUAACG | 4535 | CGTTAGTA GGCTAGCTACAACGA GAGTGTCG | 9332 |
| 95 | ACACUCAU A CUAACGCC | 4536 | GGCGTTAG GGCTAGCTACAACGA ATGAGTGT | 9333 |
| 91 | UCAUACUA A CGCCAUGG | 4537 | CCATGGCG GGCTAGCTACAACGA TAGTATGA | 9334 |
| 89 | AUACUAAC G CCAUGGCU | 4538 | AGCCATGG GGCTAGCTACAACGA GTTAGTAT | 9335 |
| 86 | CUAACGCC A UGGCUAGA | 4539 | TCTAGCCA GGCTAGCTACAACGA GGCGTTAG | 9336 |
| 83 | ACGCCAUG G CUAGACGC | 4540 | GCGTCTAG GGCTAGCTACAACGA CATGGCGT | 9337 |
| 78 | AUGGCUAG A CGCUUUCU | 4541 | AGAAAGCG GGCTAGCTACAACGA CTAGCCAT | 9338 |
| 76 | GGCUAGAC G CUUUCUGC | 4542 | GCAGAAAG GGCTAGCTACAACGA GTCTAGCC | 9339 |
| 69 | CGCUUUCU G CGUGAAGA | 4543 | TCTTCACG GGCTAGCTACAACGA AGAAAGCG | 9340 |
| 67 | CUUUCUGC G UGAAGACA | 4544 | TGTCTTCA GGCTAGCTACAACGA GCAGAAAG | 9341 |
| 61 | GCGUGAAG A CAGUAGUU | 4545 | AACTACTG GGCTAGCTACAACGA CTTCACGC | 9342 |
| 58 | UGAAGACA G UAGUUCCU | 4546 | AGGAACTA GGCTAGCTACAACGA TGTCTTCA | 9343 |
| 55 | AGACAGUA G UUCCUCAC | 4547 | GTGAGGAA GGCTAGCTACAACGA TACTGTCT | 9344 |
| 48 | AGUUCCUC A CAGGGGAG | 4548 | CTCCCCTG GGCTAGCTACAACGA GAGGAACT | 9345 |
| 40 | ACAGGGGA G UGAUCUAU | 4549 | ATAGATCA GGCTAGCTACAACGA TCCCCTGT | 9346 |
| 37 | GGGGAGUG A UCUAUGGU | 4550 | ACCATAGA GGCTAGCTACAACGA CACTCCCC | 9347 |
| 33 | AGUGAUCU A UGGUGGAG | 4551 | CTCCACCA GGCTAGCTACAACGA AGATCACT | 9348 |
| 30 | GAUCUAUG G UGGAGUGU | 4552 | ACACTCCA GGCTAGCTACAACGA CATAGATC | 9349 |
| 25 | AUGGUGGA G UGUCGCCC | 4553 | GGGCGACA GGCTAGCTACAACGA TCCACCAT | 9350 |
| 23 | GGUGGAGU G UCGCCCCC | 4554 | GGGGGCGA GGCTAGCTACAACGA ACTCCACC | 9351 |

Input Sequence = HPCK1S1.
Cut Site = R/Y
Arm Length = 8.
Core Sequence = GGCTAGCTACAACGA
HPCK1S1 Hepatitis C virus (strain HCV-1b, clone HCV-K1-S1), complete genome; acc# gi|1030702|dbj|D50483.1; 9410 nt

[0391] TABLE V
Synthetic anti-HCV nucleic acid molecule and Target Sequences

| | | | | | | | Nu- |
|---|---|---|---|---|---|---|---|
| | | | | | | | cleic |
| ref | Ref | | Seq | | | Seq | Acid |
| pos | Seq | Target | ID | RPI# | Nucleic Acid | ID | Alias |
| 195 | HCV+ | GGGUCCU U UCUUGGA | 4556 | 15364 | cₛcₛaₛaₛga cUGAuGaggcgaaagccGaa Aggacc B | 9352 | Ham- |
| | | | | | | | mer- |
| | | | | | | | head |
| 342 | HCV+ | AGACCGUGCAUCAUGAGCAC | 4555 | 17501 | GₛTₛGₛCₛTₛCₛAₛTₛGₛAₛTₛGₛCₛAₛCₛGₛGₛTₛCₛT | 9353 | Anti- |
| | | | | | | | sense |
| 195 | HCV+ | GGGUCCU U UCUUGGA | 4556 | 17558 | cₛcₛaₛaₛga cUGAuGaggcguuagccGaZ Aggacc B | 9354 | Ham- |
| | | | | | | | mer- |
| | | | | | | | head |
| 195 | HCV+ | GGGUCCU U UCUUGGA | 4556 | 17559 | cₛcₛaₛaₛga cUGAuGaggcguuagccGaa AggaZc B | 9355 | Ham- |
| | | | | | | | mer- |
| | | | | | | | head |
| 195 | HCV+ | GGGUCCU U UCUUGGA | 4556 | 17560 | Zₛcₛaₛaₛga cUGAuGaggcguuagccGaa Aggacc B | 9356 | Ham- |
| | | | | | | | mer- |
| | | | | | | | head |
| 195 | HCV+ | GGGUCCU U UCUUGGA | 4556 | 17561 | Z cₛaₛaₛga cUGAuGaggcguuagccGaa Aggacc B | 9357 | Ham- |
| | | | | | | | mer- |
| | | | | | | | head |
| 195 | HCV+ | GGGUCCU U UCUUGGA | 4556 | 18012 | ccaagacUGAuGaggcguuagccGaa Aggacc B | 9358 | Ham- |
| | | | | | | | mer- |
| | | | | | | | head |
| 82 | HCV+ | GCGUCUA G CCAUGGC | 4557 | 18744 | gₛcₛcₛaₛugg GccgaaagGCGaGucaaGGuCu uagacgc B | 9359 | Zin- |
| | | | | | | | zyme |
| 100 | HCV+ | AGUAUGA G UGUCGUG | 4558 | 18745 | cₛaₛcₛgₛaca GccgaaagGCGaGucaaGGuCu ucauacu B | 9360 | Zin- |
| | | | | | | | zyme |
| 102 | HCV+ | UAUGAGU G UCGUGCA | 4559 | 18746 | uₛgₛcₛaₛcga GccgaaagGCGaGucaaGGuCu acucaua B | 9361 | Zin- |
| | | | | | | | zyme |
| 105 | HCV+ | GAGUGUC G UGCAGCC | 4560 | 18747 | gₛgₛcₛuₛgca GccgaaagGCGaGucaaGGuCu gacacuc B | 9362 | Zin- |
| | | | | | | | zyme |
| 107 | HCV+ | GUGUCGU G CAGCCUC | 4561 | 18748 | gₛaₛgₛgₛcug GccgaaagGCGaGucaaGGuCu acgacac B | 9363 | Zin- |
| | | | | | | | zyme |
| 146 | HCV+ | CAUAGUG G UCUGCGG | 4562 | 18749 | cₛcₛgₛcₛaga GccgaaagGCGaGucaaGGuCu cacuaug B | 9364 | Zin- |
| | | | | | | | zyme |
| 190 | HCV+ | CGACCGG G UCCUUUC | 4563 | 18750 | gₛaₛaₛaₛgga GccgaaagGCGaGucaaGGuCu ccggucg B | 9365 | Zin- |
| | | | | | | | zyme |
| 217 | HCV+ | GCUCAAU G CCUGGAG | 4564 | 18751 | cₛuₛcₛcₛagg GccgaaagGCGaGucaaGGuCu auugagc B | 9366 | Zin- |
| | | | | | | | zyme |
| 231 | HCV+ | GAUUUGG G CGUGCCC | 4565 | 18752 | gₛgₛgₛcₛacg GccgaaagGCGaGucaaGGuCu ccaaauc B | 9367 | Zin- |
| | | | | | | | zyme |
| 258 | HCV+ | UAGCCGA G UAGUGUU | 4566 | 18753 | aₛaₛcₛaₛcua GccgaaagGCGaGucaaGGuCu ucggcua B | 9368 | Zin- |
| | | | | | | | zyme |
| 307 | HCV+ | GGUGCUU G CGAGUGC | 4567 | 18754 | gₛcₛaₛcₛucg GccgaaagGCGaGucaaGGuCu aagcacc B | 9369 | Zin- |
| | | | | | | | zyme |
| 77 | HCV+ | GAAAGC G UCUAGC | 4568 | 18755 | gₛcₛuₛaₛga GccgaaagGCGaGucaaGGuCu gcuuuc B | 9370 | Zin- |
| | | | | | | | zyme |
| 77 | HCV+ | AGAAAGC G UCUAGCC | 4569 | 18756 | gₛgₛcₛuₛaga GccgaaagGCGaGucaaGGuCu gcuuucu B | 9371 | Zin- |
| | | | | | | | zyme |
| 88 | HCV+ | AGCCAUG G CGUUAGU | 4570 | 18757 | aₛcₛuₛaₛacg GccgaaagGCGaGucaaGGuCu cauggcu B | 9372 | Zin- |
| | | | | | | | zyme |
| 94 | HCV+ | GCGUUA G UAUGAGU | 4571 | 18758 | aₛcₛuₛcₛaua GccgaaagGCGaGucaaGGuCu uaacgcc B | 9373 | Zin- |
| | | | | | | | zyme |
| 102 | HCV+ | AUGAGU G UCGUGC | 4572 | 18759 | gₛcₛaₛcₛga GccgaaagGCGaGucaaGGuCu acucau B | 9374 | Zin- |
| | | | | | | | zyme |
| 105 | HCV+ | AGUGUC G UGCAGC | 4573 | 18760 | gₛcₛuₛgₛca GccgaaagGCGaGucaaGGuCu gacacu B | 9375 | Zin- |
| | | | | | | | zyme |
| 110 | HCV+ | UCGUGCA G CCUCCAG | 4574 | 18761 | cₛuₛgₛgₛagg GccgaaagGCGaGucaaGGuCu ugcacga B | 9376 | Zin- |
| | | | | | | | zyme |
| 137 | HCV+ | GGGAGA G CCAUAG | 4575 | 18762 | cₛuₛaₛuₛgg GccgaaagGCGaGucaaGGuCu ucuccc B | 9377 | Zin- |
| | | | | | | | zyme |
| 137 | HCV+ | CGGGAGA G CCAUAGU | 4576 | 18763 | aₛcₛuₛaₛugg GccgaaagGCGaGucaaGGuCu ucucccg B | 9378 | Zin- |
| | | | | | | | zyme |
| 146 | HCV+ | AUAGUG G UCUGCG | 4577 | 18764 | cₛgₛcₛaₛga GccgaaagGCGaGucaaGGuCu cacuau B | 9379 | Zin- |
| | | | | | | | zyme |
| 150 | HCV+ | GUGGUCU G CGGAACC | 4578 | 18765 | gₛgₛuₛuₛccg GccgaaagGCGaGucaaGGuCu agaccac B | 9380 | Zin- |
| | | | | | | | zyme |
| 176 | HCV+ | CGGAAUU G CCAGGAC | 4579 | 18766 | gₛuₛcₛcₛugg GccgaaagGCGaGucaaGGuCu aauuccg B | 9381 | Zin- |
| | | | | | | | zyme |
| 190 | HCV+ | GACCGG G UCCUUU | 4580 | 18767 | aₛaₛaₛgₛga GccgaaagGCGaGucaaGGuCu ccgguc B | 9382 | Zin- |
| | | | | | | | zyme |
| 253 | HCV+ | CUGCUA G CCGAGU | 4581 | 18768 | aₛcₛuₛcₛgg GccgaaagGCGaGuoaaGGuCu uagcag B | 9383 | Zin- |
| | | | | | | | zyme |
| 253 | HCV+ | ACUGCUA G CCGAGUA | 4582 | 18769 | uₛaₛcₛuₛcgg GccgaaagGCGaGucaaGGuCu uagcagu B | 9384 | Zin- |
| | | | | | | | zyme |
| 258 | HCV+ | AGCCGA G UAGUGU | 4583 | 18770 | aₛcₛaₛcₛua GccgaaagGCGaGucaaGGuCu ucggcu B | 9385 | Zin- |
| | | | | | | | zyme |
| 263 | HCV+ | GAGUAGU G UUGGGUC | 4584 | 18771 | gₛaₛcₛcₛcaa GccgaaagGCGaGucaaGGuCu acuacuc B | 9386 | Zin- |
| | | | | | | | zyme |
| 268 | HCV+ | UGUUGG G UCGCGA | 4585 | 18772 | uₛcₛgₛcₛga GccgaaagGCGaGucaaGGuCu ccaaca B | 9387 | Zin- |
| | | | | | | | zyme |
| 268 | HCV+ | GUGUUGG G UCGCGAA | 4586 | 18773 | uₛuₛcₛgₛcga GccgaaagGCGaGucaaGGuCu ccaacac B | 9388 | Zin- |
| | | | | | | | zyme |
| 271 | HCV+ | UUGGGUC G CGAAAGG | 4587 | 18774 | cₛcₛuₛuₛucg GccgaaagGCGaGucaaGGuCu gacccaa B | 9389 | Zin- |
| | | | | | | | zyme |
| 283 | HCV+ | AGGCCUU G UGGUACU | 4588 | 18775 | aₛgₛuₛaₛcca GccgaaagGCGaGucaaGGuCu aaggccu B | 9390 | Zin- |
| | | | | | | | zyme |
| 286 | HCV+ | CCUUGUG G UACUGCC | 4589 | 18776 | gₛgₛcₛaₛgua GccgaaagGCGaGucaaGGuCu cacaagg B | 9391 | Zin- |
| | | | | | | | zyme |
| 291 | HCV+ | UGGUACU G CCUGAUA | 4590 | 18777 | uₛaₛuₛcₛagg GccgaaagGCGaGucaaGGuCu aguacca B | 9392 | Zin- |
| | | | | | | | zyme |
| 301 | HCV+ | UGAUAGG G UGCUUGC | 4591 | 18778 | gₛcₛaₛaₛgca GccgaaagGCGaGucaaGGuCu ccuauca B | 9393 | Zin- |
| | | | | | | | zyme |
| 303 | HCV+ | AUAGGGU G CUUGCGA | 4592 | 18779 | uₛcₛgₛcₛaag GccgaaagGCGaGucaaGGuCu acccuau B | 9394 | Zin- |
| | | | | | | | zyme |
| 60 | HCV+ | ACUACU G UCUUCA | 4593 | 18780 | uₛgₛaₛaₛga GccgaaagGCGaGucaaGGuCu aguagu B | 9395 | Zin- |
| | | | | | | | zyme |
| 60 | HCV+ | AACUACU G UCUUCAC | 4594 | 18781 | gₛuₛgₛaₛaga GccgaaagGCGaGucaaGGuCu augaguu B | 9396 | Zin- |
| | | | | | | | zyme |
| 68 | HCV+ | UCUUCAC G CAGAAAG | 4595 | 18782 | cₛuₛuₛuₛcug GccgaaagGCGaGucaaGGuCu gugaaga B | 9397 | Zin- |
| | | | | | | | zyme |
| 75 | HCV+ | CAGAAA G CGUCUA | 4596 | 18783 | uₛaₛgₛaₛcg GccgaaagGCGaGucaaGGuCu uuucug B | 9398 | Zin- |
| | | | | | | | zyme |
| 82 | HCV+ | CGUCUA G CCAUGG | 4597 | 18784 | cₛcₛaₛuₛgg GccgaaagGCGaGucaaGGuCu uagacg B | 9399 | Zin- |
| | | | | | | | zyme |
| 88 | HCV+ | GCCAUG G CGUUAG | 4598 | 18785 | cₛuₛaₛaₛcg GccgaaagGCGaGucaaGGuCu cauggc B | 9400 | Zin- |
| | | | | | | | zyme |
| 90 | HCV+ | CAUGGC G UUAGUA | 4599 | 18786 | uₛaₛcₛuₛaa GccgaaagGCGaGucaaGCuCu gccaug B | 9401 | Zin- |
| | | | | | | | zyme |
| 90 | HCV+ | CCAUGGC G UUAGUAU | 4600 | 18787 | aₛuₛaₛcₛuaa GccgaaagGCGaGucaaGGuCu gccaugg B | 9402 | Zin- |
| | | | | | | | zyme |
| 100 | HCV+ | GUAUGA G UGUCGU | 4601 | 18788 | aₛcₛgₛaₛca GccgaaagGCGaGucaaGGuCu ucauac B | 9403 | Zin- |
| | | | | | | | zyme |
| 107 | HCV+ | UGUCGU G CAGCCU | 4602 | 18789 | aₛgₛgₛcₛug GccgaaagGCGaGucaaGGuCu acgaca B | 9404 | Zin- |
| | | | | | | | zyme |
| 110 | HCV+ | CGUCCA G CCUCCA | 4603 | 18790 | uₛgₛgₛaₛgg GccgaaagGCGaGucaaGGuCu acgaca B | 9405 | Zin- |
| | | | | | | | zyme |
| 150 | HCV+ | UGGUCU G CGGAAC | 4604 | 18791 | gₛuₛuₛcₛcg GccgaaagGCGaGucaaGGuCu ugcacg B | 9406 | Zin- |
| | | | | | | | zyme |
| 159 | HCV+ | GGAACCG G UGAGUAC | 4605 | 18792 | gₛuₛaₛcₛuca GccgaaagGCGaGucaaGGuCu cgguucc B | 9407 | Zin- |
| | | | | | | | zyme |
| 176 | HCV+ | GGAAUU G CCAGGA | 4606 | 18793 | uₛcₛcₛuₛgg GccgaaagGCGaGucaaGGuCu aauucc B | 9408 | Zin- |
| | | | | | | | zyme |
| 217 | HCV+ | CUCAAU G CCUGGA | 4607 | 18794 | uₛcₛcₛaₛgg GccgaaagGCGaGucaaGGuCu auugag B | 9409 | Zin- |
| | | | | | | | zyme |
| 231 | HCV+ | AUUUGG G CGUGCC | 4608 | 18795 | gₛgₛcₛaₛcg GccgaaagGCGaGucaaGGuCu ccaaau B | 9410 | Zin- |
| | | | | | | | zyme |
| 261 | HCV+ | CGAGUA G UGUUGG | 4609 | 18796 | cₛcₛaₛaₛca GccgaaagGCGaGucaaGGuCu uacucg B | 9411 | Zin- |
| | | | | | | | zyme |
| 261 | HCV+ | CCGAGUA G UGUUGGG | 4610 | 18797 | cₛcₛcₛaₛaca GccgaaagGCGaGucaaGGuCu uacucgg B | 9412 | Zin- |
| | | | | | | | zyme |
| 263 | HCV+ | AGUAGU G UUGGGU | 4611 | 18798 | aₛcₛcₛcₛaa GccgaaagGCGaGucaaGGuCu acuacu B | 9413 | Zin- |
| | | | | | | | zyme |
| 271 | HCV+ | UGGGUC G CGAAAG | 4612 | 18799 | cₛuₛuₛuₛcg GccgaaagGCGaGucaaGGuCu gaccca B | 9414 | Zin- |
| | | | | | | | zyme |
| 283 | HCV+ | GGCCUU G UGGUAC | 4613 | 18800 | gₛuₛaₛcₛca GccgaaagGCGaGucaaGGuCu aaggcc B | 9415 | Zin- |
| | | | | | | | zyme |
| 291 | HCV+ | GGUACU G CCUGAU | 4614 | 18801 | aₛuₛcₛaₛgg GccgaaagGCGaGucaaGGuCu aguacc B | 9416 | Zin- |
| | | | | | | | zyme |
| 303 | HCV+ | UAGGGU G CUUGCG | 4615 | 18802 | cₛgₛcₛaₛag GccgaaagGCGaGucaaGGuCu acccua B | 9417 | Zin- |
| | | | | | | | zyme |
| 307 | HCV+ | GUGCUU G CGAGUG | 4616 | 18803 | cₛaₛcₛuₛcg GccgaaagGCGaGucaaGGuCu aagcac B | 9418 | Zin- |
| | | | | | | | zyme |
| 323 | HCV+ | CGGGAG G UCUCGU | 4617 | 18804 | aₛcₛgₛaₛga GccgaaagGCGaGucaaGGuCu cucccg B | 9419 | Zin- |
| | | | | | | | zyme |
| 323 | HCV+ | CCGGGAG G UCUCGUA | 4618 | 18805 | uₛaₛcₛgₛaga GccgaaagGCGaGucaaGGuCu cucccgg B | 9420 | Zin- |
| | | | | | | | zyme |
| 75 | HCV+ | GCAGAAA G CGUCUAG | 4619 | 18806 | cₛuₛaₛgₛacg GccgaaagGCGaGucaaGGuCu uuucugc B | 9421 | Zin- |
| | | | | | | | zyme |
| 143 | HCV+ | GCCAUA G UGGUCU | 4620 | 18807 | aₛgₛaₛcₛca GccgaaagGCGaGucaaGGuCu uauggc B | 9422 | Zin- |
| | | | | | | | zyme |
| 278 | HCV+ | GCGAAAG G CCUUGUG | 4621 | 18808 | cₛaₛcₛaₛagg GccgaaagGCGaGucaaGGuCu cuuucgc B | 9423 | Zin- |
| | | | | | | | zyme |
| 163 | HCV+ | CGGUGA G UACACC | 4622 | 18809 | gₛgₛuₛgₛua GccgaaagGCGaGucaaGGuCu ucaccg B | 9424 | Zin- |
| | | | | | | | zyme |
| 68 | HCV+ | CUUCAC G CAGAAA | 4623 | 18810 | uₛuₛuₛcₛug GccgaaagGCGaGucaaGGuCu gugaag B | 9425 | Zin- |
| | | | | | | | zyme |
| 94 | HCV+ | GCGUUA G UAUGAG | 4624 | 18811 | cₛuₛcₛaₛua GccgaaagGCGaGucaaGGuCu uuaacgc B | 9426 | Zin- |
| | | | | | | | zyme |
| 143 | HCV+ | AGCCAUA G UGGUCUG | 4625 | 18812 | cₛaₛgₛaₛcca GccgaaagGCGaGucaaGGuCu uauggcu B | 9427 | Zin- |
| | | | | | | | zyme |
| 159 | HCV+ | GAACCG G UGAGUA | 4626 | 18813 | uₛaₛcₛuₛca GccgaaagGCGaGucaaGGuCu cgguuc B | 9428 | Zin- |
| | | | | | | | zyme |
| 163 | HCV+ | CCGGUGA G UACACCG | 4627 | 18814 | cₛgₛgₛuₛgua GccgaaagGCGaGucaaGGuCu ucaccgg B | 9429 | Zin- |
| | | | | | | | zyme |
| 249 | HCV+ | GAGACU G CUAGCC | 4628 | 18815 | gₛgₛcₛuₛag GccgaaagGCGaGucaaGGuCu agucuc B | 9430 | Zin- |
| | | | | | | | zyme |
| 249 | HCV+ | CGAGACU G CUAGCCG | 4629 | 18816 | cₛgₛgₛcₛuag GcogaaagGCGaGucaaGGuCu agucucg B | 9431 | Zin- |
| | | | | | | | zyme |
| 278 | HCV+ | CGAAAG G CCUUGU | 4630 | 18817 | aₛcₛaₛaₛgg GccgaaagGCGaGucaaGGuCu cuuucg B | 9432 | Zin- |
| | | | | | | | zyme |
| 286 | HCV+ | CUUGUG G UACUGC | 4631 | 18818 | gₛcₛaₛgₛua GccgaaagGCGaGucaaGGuCu cacaag B | 9433 | Zin- |
| | | | | | | | zyme |
| 301 | HCV+ | GAUAGG G UGCUUG | 4632 | 18819 | cₛaₛaₛgₛca GccgaaagGCGaGucaaGGuCu ccuauc B | 9434 | Zin- |
| | | | | | | | zyme |
| 328 | HCV+ | GGUCUC G UAGACC | 4633 | 18820 | gₛgₛuₛcₛua GccgaaagGCGaGucaaGGuCu gagacc B | 9435 | Zin- |
| | | | | | | | zyme |
| 328 | HCV+ | AGGUCUC G UAGACCG | 4634 | 18821 | cₛgₛgₛuₛcua GccgaaagGCGaGucaaGGuCu gagaccu B | 9436 | Zin- |
| | | | | | | | zyme |
| 335 | HCV+ | UAGACC G UGCACC | 4635 | 18822 | gₛgₛuₛgₛca GccgaaagGCGaGucaaGGuCu ggucua B | 9437 | Zin- |
| | | | | | | | zyme |
| 30 | C | UAAACCU C AAAGAAA | 4636 | 19108 | uₛuₛuₛcₛuuu cUGAuGaggccguuaggccGaa Agguuua B | 9438 | Ham- |
| | | | | | | | mer- |
| | | | | | | | head |
| 48 | C | CAAACGU A ACACCAA | 4637 | 19109 | uₛuₛgₛgₛugu cUGAuGaggccguuaggccGaa Acguuug B | 9439 | Ham- |
| | | | | | | | mer- |
| | | | | | | | head |
| 60 | C | CAACCGU C GCCCACA | 4638 | 19110 | uₛgₛuₛgₛggc cUGAuGaggccguuaggccGaa Acgguug B | 9440 | Ham- |
| | | | | | | | mer- |
| | | | | | | | head |
| 175 | C | GAGCGGU C ACAACCU | 4639 | 19111 | aₛgₛgₛuₛugu cUGAuGaggccguuaggccGaa Accgcuc B | 9441 | Ham- |
| | | | | | | | mer- |
| | | | | | | | head |
| 374 | C | GUAAGGU C AUCGAUA | 4640 | 19112 | uₛaₛuₛcₛgau cUGAuGaggccguuaggccGaa Accuuac B | 9442 | Ham- |
| | | | | | | | mer- |
| | | | | | | | head |
| 258 | S27 | UGGUGGCUCCAUCUUAGCCCUAG | 4641 | 22022 | uₛgₛgₛuₛgₛgₛcₛuₛcₛcₛaₛuₛcₛuₛuₛaₛgₛcₛcₛcₛuₛaₛg | 9443 | Anti- |
| | | | | | | | sense |
| 259 | S27 | GGUGGCUCCAUCUUAGCCCUAGU | 4642 | 22023 | gₛgₛuₛgₛgₛcₛuₛcₛcₛaₛuₛcₛuₛuₛaₛgₛcₛcₛcₛuₛaₛgₛu | 9444 | Anti- |
| | | | | | | | sense |
| 260 | S27 | GUGGCUCCAUCUUAGCCCUAGUC | 4643 | 22024 | gₛuₛgₛgₛcₛuₛcₛcₛaₛuₛcₛuₛuₛaₛgₛcₛcₛcₛuₛaₛgₛuₛc | 9445 | Anti- |
| | | | | | | | sense |
| 261 | S27 | UGGCUCCAUCUUAGCCCUAGUCA | 4644 | 22025 | uₛgₛgₛcₛuₛcₛcₛaₛuₛcₛuₛuₛaₛgₛcₛcₛcₛuₛaₛgₛuₛcₛa | 9446 | Anti- |
| | | | | | | | sense |
| 262 | S27 | GGCUCCAUCUUAGCCCUAGUCAC | 4645 | 22026 | gₛgₛcₛuₛcₛcₛaₛuₛcₛuₛuₛaₛgₛcₛcₛcₛuₛaₛgₛuₛcₛaₛc | 9447 | Anti- |
| | | | | | | | sense |
| 263 | S27 | GCUCCAUCUUAGCCCUAGUCACG | 4646 | 22027 | gₛcₛuₛcₛcₛaₛuₛcₛuₛuₛaₛgₛcₛcₛcₛuₛaₛgₛuₛcₛaₛcₛg | 9448 | Anti- |
| | | | | | | | sense |
| 264 | S27 | CUCCAUCUUAGCCCUAGUCACGG | 4647 | 22028 | cₛuₛcₛcₛaₛuₛcₛuₛuₛaₛgₛcₛcₛcₛuₛaₛgₛuₛcₛaₛcₛgₛg | 9449 | Anti- |
| | | | | | | | sense |
| 265 | S27 | UCCAUCUUAGCCCUAGUCACGGC | 4648 | 22029 | uₛcₛcₛaₛuₛcₛuₛuₛaₛgₛcₛcₛcₛuₛaₛgₛuₛcₛaₛcₛgₛgₛc | 9450 | Anti- |
| | | | | | | | sense |
| 266 | S27 | CCAUCUUAGCCCUAGUCACGGCU | 4649 | 22030 | cₛcₛaₛuₛcₛuₛuₛaₛgₛcₛcₛcₛuₛaₛgₛuₛcₛaₛcₛgₛgₛcₛu | 9451 | Anti- |
| | | | | | | | sense |
| 267 | S27 | CAUCUUAGCCCUAGUCACGGCUA | 4650 | 22031 | cₛaₛuₛcₛuₛuₛaₛgₛcₛcₛcₛuₛaₛgₛuₛcₛaₛcₛgₛgₛcₛuₛa | 9452 | Anti- |
| | | | | | | | sense |
| 268 | S27 | AUCUUAGCCCUAGUCACGGCUAG | 4651 | 22032 | aₛuₛcₛuₛuₛaₛgₛcₛcₛcₛuₛaₛgₛuₛcₛaₛcₛgₛgₛcₛuₛaₛg | 9453 | Anti- |
| | | | | | | | sense |
| 269 | S27 | UCUUAGCCCUAGUCACGGCUAGC | 4652 | 22033 | uₛcₛuₛuₛaₛgₛcₛcₛcₛuₛaₛgₛuₛcₛaₛcₛgₛgₛcₛuₛaₛgₛc | 9454 | Anti- |
| | | | | | | | sense |
| 270 | S27 | CUUAGCCCUAGUCACGGCUAGCU | 4653 | 22034 | cₛuₛuₛaₛgₛcₛcₛcₛuₛaₛgₛuₛcₛaₛcₛgₛgₛcₛuₛaₛgₛcₛu | 9455 | Anti- |
| | | | | | | | sense |
| 271 | S27 | UUAGCCCUAGUCACGGCUAGCUG | 4654 | 22035 | uₛuₛaₛgₛcₛcₛcₛuₛaₛgₛuₛcₛaₛcₛgₛgₛcₛuₛaₛgₛcₛuₛg | 9456 | Anti- |
| | | | | | | | sense |
| 272 | S27 | UAGCCCUAGUCACGGCUAGCUGU | 4655 | 22036 | uₛaₛgₛcₛcₛcₛuₛaₛgₛuₛcₛaₛcₛgₛgₛcₛuₛaₛgₛcₛuₛgₛu | 9457 | Anti- |
| | | | | | | | sense |
| 273 | S27 | AGCCCUAGUCACGGCUAGCUGUG | 4656 | 22037 | aₛgₛcₛcₛcₛuₛaₛgₛuₛcₛaₛcₛgₛgₛcₛuₛaₛgₛcₛuₛgₛuₛg | 9458 | Anti- |
| | | | | | | | sense |
| 274 | S27 | GCCCUAGUCACGGCUAGCUGUGA | 4657 | 22038 | gₛcₛcₛcₛuₛaₛgₛuₛcₛaₛcₛgₛgₛcₛuₛaₛgₛcₛuₛgₛuₛgₛa | 9459 | Anti- |
| | | | | | | | sense |
| 275 | S27 | CCCUAGUCACGGCUAGCUGUGAA | 4658 | 22039 | cₛcₛcₛuₛaₛgₛuₛcₛaₛcₛgₛgₛcₛuₛaₛgₛcₛuₛgₛuₛgₛaₛa | 9460 | Anti- |
| | | | | | | | sense |
| 276 | S27 | CCUAGUCACGGCUAGCUGUGAAA | 4659 | 22040 | cₛcₛuₛaₛgₛuₛcₛaₛcₛgₛgₛcₛuₛaₛgₛcₛuₛgₛuₛgₛaₛaₛa | 9461 | Anti- |
| | | | | | | | sense |
| 277 | S27 | CUAGUCACGGCUAGCUGUGAAAG | 4660 | 22041 | cₛuₛaₛgₛuₛcₛaₛcₛgₛgₛcₛuₛaₛgₛcₛuₛgₛuₛgₛaₛaₛaₛg | 9462 | Anti- |
| | | | | | | | sense |
| 278 | S27 | UAGUCACGGCUAGCUGUGAAAGG | 4661 | 22042 | uₛaₛgₛuₛcₛaₛcₛgₛgₛcₛuₛaₛgₛcₛuₛgₛuₛgₛaₛaₛaₛgₛg | 9463 | Anti- |
| | | | | | | | sense |
| 279 | S27 | AGUCACGGCUAGCUGUGAAAGGU | 4662 | 22043 | aₛgₛuₛcₛaₛcₛgₛgₛcₛuₛaₛgₛcₛuₛgₛuₛgₛaₛaₛaₛgₛgₛu | 9464 | Anti- |
| | | | | | | | sense |
| 280 | S27 | GUCACGGCUAGCUGUGAAAGGUC | 4663 | 22044 | gₛuₛcₛaₛcₛgₛgₛcₛuₛaₛgₛcₛuₛgₛuₛgₛaₛaₛaₛgₛgₛuₛc | 9465 | Anti- |
| | | | | | | | sense |
| 281 | S27 | UCACGGCUAGCUGUGAAAGGUCC | 4664 | 22045 | uₛcₛaₛcₛgₛgₛcₛuₛaₛgₛcₛuₛgₛuₛgₛaₛaₛaₛgₛgₛuₛcₛc | 9466 | Anti- |
| | | | | | | | sense |
| 282 | S27 | CACGGCUAGCUGUGAAAGGUCCG | 4665 | 22046 | cₛaₛcₛgₛgₛcₛuₛaₛgₛcₛuₛgₛuₛgₛaₛaₛaₛgₛgₛuₛcₛcₛg | 9467 | Anti- |
| | | | | | | | sense |
| 283 | S27 | ACGGCUAGCUGUGAAAGGUCCGU | 4666 | 22047 | aₛcₛgₛgₛcₛuₛaₛgₛcₛuₛgₛuₛgₛaₛaₛaₛgₛgₛuₛcₛcₛgₛu | 9468 | Anti- |
| | | | | | | | sense |
| 284 | S27 | CGGCUAGCUGUGAAAGGUCCGUG | 4667 | 22048 | cₛgₛgₛcₛuₛaₛgₛcₛuₛgₛuₛgₛaₛaₛaₛgₛgₛuₛcₛcₛgₛuₛg | 9469 | Anti- |
| | | | | | | | sense |
| 285 | S27 | GGCUAGCUGUGAAAGGUCCGUGA | 4668 | 22049 | gₛgₛcₛuₛaₛgₛcₛuₛgₛuₛgₛaₛaₛaₛgₛgₛuₛcₛcₛgₛuₛgₛa | 9470 | Anti- |
| | | | | | | | sense |
| 286 | S27 | GCUAGCUGUGAAAGGUCCGUGAG | 4669 | 22050 | gₛcₛuₛaₛgₛcₛuₛgₛuₛgₛaₛaₛaₛgₛgₛuₛcₛcₛgₛuₛgₛaₛg | 9471 | Anti- |
| | | | | | | | sense |
| 287 | S27 | CUAGCUGUGAAAGGUCCGUGAGC | 4670 | 22051 | cₛuₛaₛgₛcₛuₛgₛuₛgₛaₛaₛaₛgₛgₛuₛcₛcₛgₛuₛgₛaₛgₛc | 9472 | Anti- |
| | | | | | | | sense |
| 311 | S27 | GCAUGACUGCAGAGAGUGCUGAU | 4671 | 22052 | gₛcₛaₛuₛgₛaₛcₛuₛgₛcₛaₛgₛaₛgₛaₛgₛuₛgₛcₛuₛgₛaₛu | 9473 | Anti- |
| | | | | | | | sense |
| 312 | S27 | CAUGACUGCAGAGAGUGCUGAUA | 4672 | 22053 | cₛaₛuₛhₛaₛcₛuₛgₛcₛaₛgₛaₛgₛaₛgₛuₛgₛcₛuₛgₛaₛuₛa | 9474 | Anti- |
| | | | | | | | sense |
| 313 | S27 | AUGACUGCAGAGAGUGCUGAUAC | 4673 | 22054 | aₛuₛgₛaₛcₛuₛgₛcₛaₛgₛaₛgₛaₛgₛuₛgₛcₛuₛgₛaₛuₛaₛc | 9475 | Anti- |
| | | | | | | | sense |
| 314 | S27 | UGACUGCAGAGAGUGCUGAUACU | 4674 | 22055 | uₛgₛaₛcₛuₛgₛcₛaₛgₛaₛgₛaₛgₛuₛgₛcₛuₛgₛaₛuₛaₛcₛu | 9476 | Anti- |
| | | | | | | | sense |
| 315 | S27 | GACUGCAGAGAGUGCUGAUACUG | 4675 | 22056 | gₛaₛcₛuₛgₛcₛaₛgₛaₛgₛaₛgₛuₛgₛcₛuₛgₛaₛuₛaₛcₛuₛg | 9477 | Anti- |
| | | | | | | | sense |
| 316 | S27 | ACUGCAGAGAGUGCUGAUACUGG | 4676 | 22057 | aₛcₛuₛgₛcₛaₛgₛaₛgₛaₛgₛuₛgₛcₛuₛgₛaₛuₛaₛcₛuₛgₛg | 9478 | Anti- |
| | | | | | | | sense |
| 317 | S27 | CUGCAGAGAGUGCUGAUACUGGC | 4677 | 22058 | cₛuₛgₛcₛaₛgₛaₛgₛaₛgₛuₛgₛcₛuₛgₛaₛuₛaₛcₛuₛgₛgₛc | 9479 | Anti- |
| | | | | | | | sense |
| 318 | S27 | UGCAGAGAGUGCUGAUACUGGCC | 4678 | 22059 | uₛgₛcₛaₛgₛaₛgₛaₛgₛuₛgₛcₛuₛgₛaₛuₛaₛcₛuₛgₛgₛcₛc | 9480 | Anti- |
| | | | | | | | sense |
| 319 | S27 | GCAGAGAGUGCUGAUACUGGCCU | 4679 | 22060 | gₛcₛaₛgₛaₛgₛaₛgₛuₛgₛcₛuₛgₛaₛuₛaₛcₛuₛgₛgₛcₛcₛu | 9481 | Anti- |
| | | | | | | | sense |
| 320 | S27 | CAGAGAGUGCUGAUACUGGCCUC | 4680 | 22061 | cₛaₛgₛaₛgₛaₛgₛuₛgₛcₛuₛgₛaₛuₛaₛcₛuₛgₛgₛcₛcₛuₛc | 9482 | Anti- |
| | | | | | | | sense |
| 321 | S27 | AGAGAGUGCUGAUACUGGCCUCU | 4681 | 22062 | aₛgₛaₛgₛaₛgₛuₛgₛcₛuₛgₛaₛuₛaₛcₛuₛgₛgₛcₛcₛuₛcₛu | 9483 | Anti- |
| | | | | | | | sense |
| 322 | S27 | GAGAGUGCUGAUACUGGCCUCUC | 4682 | 22063 | gₛaₛgₛaₛgₛuₛgₛcₛuₛgₛaₛuₛaₛcₛuₛgₛgₛcₛcₛuₛcₛuₛc | 9484 | Anti- |
| | | | | | | | sense |
| 157 | HCV+ | CGGAACCGGUGAG | 4683 | 22524 | cₛuₛcₛaₛcc cUGAuGaggccguuaggccGaa Iuuccg B | 9485 | Ino- |
| | | | | | | | zyme |
| 167 | HCV+ | GAGUACACCGGAA | 4684 | 22525 | uₛuₛcₛcₛgg cUCAuGaggccguuaggccGaa Iuacuc B | 9486 | Ino- |
| | | | | | | | zyme |
| 139 | HCV+ | GAGAGCCAUAGUG | 4685 | 22526 | cₛaₛcₛUₛau cUGAuGaggccguuaggccGaa Icucuc B | 9487 | Ino- |
| | | | | | | | zyme |
| 140 | HCV+ | AGAGCCAUAGUGG | 4686 | 22527 | cₛcₛaₛcₛua cUGAuGaggccguuaggccGaa Igcucu B | 9488 | Ino- |
| | | | | | | | zyme |
| 281 | HCV+ | AAGGCCUUGUGGU | 4687 | 22528 | aₛcₛcₛaₛca cUGAuGaggccguuaggccGaa Igccuu B | 9489 | Ino- |
| | | | | | | | zyme |
| 130 | HCV+ | CCCUCCCGGGAGA | 4688 | 22529 | uₛcₛuₛcₛcc cUGAuGaggccguuaggccGaa Igaggg B | 9490 | Ino- |
| | | | | | | | zyme |
| 280 | HCV+ | AAAGGCCUUGUGG | 4689 | 22530 | cₛcₛaₛcₛaa cUGAuGaggccguuaggccGaa Iccuuu B | 9491 | Ino- |
| | | | | | | | zyme |
| 149 | HCV+ | GUGGUCUGCGGAA | 4690 | 22531 | uₛuₛcₛcₛgc cUGAuGaggccguuaggccGaa Iaccac B | 9492 | Ino- |
| | | | | | | | zyme |
| 194 | HCV+ | GGGUCCUUUCUUG | 4691 | 22532 | cₛaₛaₛgₛaa cUGAuGaggccguuaggccGaa Igaccc B | 9493 | Ino- |
| | | | | | | | zyme |
| 255 | HCV+ | GCUAGCCGAGUAG | 4692 | 22533 | cₛuₛaₛcₛuc cUGAuGaggccguuaggccGaa Icuagc B | 9494 | Ino- |
| | | | | | | | zyme |
| 294 | HCV+ | ACUGCCUGAUAGG | 4693 | 22534 | cₛcₛUₛaₛUC cUGAuGaggccguuaggccGaa Igcagu B | 9495 | Ino- |
| | | | | | | | zyme |
| 293 | HCV+ | UACUGCCUGAUAG | 4694 | 22535 | cₛuₛaₛuₛca cUGAuGaggccguuaggccGaa Icagua B | 9496 | Ino- |
| | | | | | | | zyme |
| 290 | HCV+ | UGGUACUGCCUGA | 4695 | 22536 | uₛcₛaₛgₛgc cUGAuGaggccguuaggccGaa Iuacca B | 9497 | Ino- |
| | | | | | | | zyme |
| 169 | HCV+ | GUACACCGGAAUU | 4696 | 22537 | aₛaₛuₛuₛcc cUGAuGaggccguuaggccGaa Iuguac B | 9498 | Ino- |
| | | | | | | | zyme |
| 293 | HCV+ | GUACUGCCUGAUAGG | 4697 | 22544 | cₛcₛuₛaₛuca cUGAuGaggccguuaggccGaa Icaguac B | 9499 | Ino- |
| | | | | | | | zyme |
| 294 | HCV+ | UACUGCCUGAUAGGG | 4698 | 22545 | cₛcₛcₛuₛauc cUGAuGaggccguuaggccGaa Igcagua B | 9500 | Ino- |
| | | | | | | | zyme |
| 281 | HCV+ | AAAGGCCUUGUGGUA | 4699 | 22546 | uₛaₛcₛcₛaca cUGAuGaggccguuaggccGaa Igccuuu B | 9501 | Ino- |
| | | | | | | | zyme |
| 166 | HCV+ | UGAGUACACCGGA | 4700 | 22549 | uₛcₛcₛgₛgu cUGAUGaggccguuaggccGaa Uacuca B | 9502 | Amber- |
| | | | | | | | zyme |
| 168 | HCV+ | AGUACACCGGAAU | 4701 | 22550 | aₛuₛuₛcₛcg cUGAUGaggccguuaggccGaa Uguacu B | 9503 | Amber- |
| | | | | | | | zyme |
| 141 | HCV+ | GAGCCAUAGUGGU | 4702 | 22551 | aₛcₛcₛaₛcu cUGAUGaggccguuaggccGaa Uggcuc B | 9504 | Amber- |
| | | | | | | | zyme |
| 156 | HCV+ | GCGGAACCGGUGA | 4703 | 22552 | uₛcₛaₛcₛcg cUGAUGaggccguuaggccGaa Uuccgc B | 9505 | Amber- |
| | | | | | | | zyme |
| 155 | HCV+ | UGCGGAACCGGUG | 4704 | 22553 | cₛaₛcₛcₛgg cUGAUGaggccguuaggccGaa Uccgca B | 9506 | Amber- |
| | | | | | | | zyme |
| 289 | HCV+ | GUGGUACUGCCUG | 4705 | 22554 | cₛaₛgₛgₛca cUGAUGaggccguuaggccGaa Uaccac B | 9507 | Amber- |
| | | | | | | | zyme |
| 297 | HCV+ | GCCUGAUAGGGUG | 4706 | 22555 | cₛaₛcₛcₛcu cUGAUGaggccguuaggccGaa Ucaggc B | 9508 | Amber- |
| | | | | | | | zyme |
| 166 | HCV+ | GUGAGUACACCGGAA | 4707 | 22556 | uₛuₛcₛcₛggu cUGAUGaggccguuaggccGaa Uacucac B | 9509 | Amber- |
| | | | | | | | zyme |
| 141 | HCV+ | AGAGCCAUAGUGGUG | 4708 | 22557 | gₛaₛcₛcₛacu cUGAUGaggccguuaggccGaa Uggcuc B | 9510 | Amber- |
| | | | | | | | zyme |
| 156 | HCV+ | UGCGGAACCGGUGAG | 4709 | 22558 | cₛuₛcₛaₛccg cUGAUGaggccguuaggccGaa Uuccgca B | 9511 | Amber- |
| | | | | | | | zyme |
| 155 | HCV+ | CUGCGGAACCGGUGA | 4710 | 22559 | uₛcₛaₛcₛcgg cUGAUGaggccguuaggccGaa Uccgcag B | 9512 | Amber- |
| | | | | | | | zyme |
| 289 | HCV+ | UGUGGUACUGCCUGA | 4711 | 22560 | uₛcₛaₛgₛgca cUGAUGaggccguuaggccGaa Uaccaca B | 9513 | Amber- |
| | | | | | | | zyme |
| 297 | HCV+ | UGCCUGAUAGGGUGG | 4712 | 22561 | gₛcₛaₛcₛccu cUGAUGaggccguuaggccGaa Ucaggca B | 9514 | Amber- |
| | | | | | | | zyme |
| 168 | HCV− | GAGUACACCGGAAUU | 4713 | 22562 | aₛaₛuₛuₛccg cUGAUGaggccguuaggccGaa Uguacuc B | 9515 | Amber- |
| | | | | | | | zyme |
| 166 | HCV− | UCCGGUGUACUCA | 4714 | 22563 | uₛgₛaₛgₛua gccgaaaggCgagugaGguGCu accgga B | 9506 | Zin- |
| | | | | | | | zyme |
| 168 | HCV− | AUUCCGGUGUACU | 4715 | 22564 | aₛgₛuₛaₛca gccgaaaggCgagugaGguGCu cggaau B | 9517 | Zin- |
| | | | | | | | zyme |
| 138 | HCV− | ACUAUGGCUCUCG | 4716 | 22565 | gₛgₛaₛgₛag gccgaaaggCgagugaGguGCu cauagu B | 9518 | Zin- |
| | | | | | | | zyme |
| 156 | HCV− | UCACCGGUUCCGG | 4717 | 22566 | gₛcₛgₛgₛaa gccgaaaggCgagugaGguGCu cgguga B | 9519 | Zin- |
| | | | | | | | zyme |
| 236 | HCV− | GCGGGGGCACGCG | 4718 | 22567 | gₛgₛcₛgₛug gccgaaaggCgagugaGguGCu ccccgc B | 9520 | Zin- |
| | | | | | | | zyme |
| 279 | HCV− | CACAAGGCCUUUG | 4719 | 22568 | gₛaₛaₛaₛgg gccgaaaggCgagugaGguGCu cuugug B | 9521 | Zin- |
| | | | | | | | zyme |
| 151 | HCV− | GGUUCCGCAGACG | 4720 | 22569 | gₛgₛuₛcₛug gccgaaaggCgagugaGguGCu ggaacc B | 9522 | Zin- |
| | | | | | | | zyme |
| 292 | HCV− | UAUCAGGCAGUAG | 4721 | 22570 | gₛuₛaₛcₛug gccgaaaggCgagugaGguGCu cugaua B | 9523 | Zin- |
| | | | | | | | zyme |
| 289 | HCV− | CAGGCAGUACCAG | 4722 | 22571 | gₛuₛgₛgₛua gccgaaaggCgagugaGguGCu ugccug B | 9524 | Zin- |
| | | | | | | | zyme |
| 166 | HCV− | UUCCGGUGUACUCAG | 4723 | 22572 | gₛuₛgₛaₛgua gccgaaaggCgagugaGguGCu accggaa B | 9525 | Zin- |
| | | | | | | | zyme |
| 279 | HCV− | CCACAAGGCCUUUCG | 4724 | 22573 | cₛgₛaₛaₛagg gccgaaaggCgagugaGguGCu cuugugg B | 9526 | Zin- |
| | | | | | | | zyme |
| 156 | HCV− | CUCACCGGUUCCGGA | 4725 | 22574 | uₛgₛcₛgₛgaa gccgaaaggCgagugaGguGCu cggugag B | 9527 | Zin- |
| | | | | | | | zyme |
| 138 | HCV− | CACUAUGGCUCUCCG | 4726 | 22575 | gₛgₛgₛaₛgag gccgaaaggCgagugaGguGCu cauagug B | 9528 | Zin- |
| | | | | | | | zyme |
| 151 | HCV− | CGGUUCCGCAGACCA | 4727 | 22576 | uₛgₛgₛuₛcug gccgaaaggCgagugaGguGCu ggaaccg B | 9529 | Zin- |
| | | | | | | | zyme |
| 292 | HCV− | CUAUCAGGCAGUACG | 4728 | 22577 | gₛgₛuₛaₛcug gccgaaaggCgagugaGguGCu cugauag B | 9530 | Zin- |
| | | | | | | | zyme |
| 289 | HCV− | UCAGGCAGUACCACA | 4729 | 22578 | uₛgₛuₛgₛgua gccgaaaggCgagugaGguGCu ugccuga B | 9531 | Zin- |
| | | | | | | | zyme |
| 168 | HCV− | AAUUCCGGUGUACUG | 4730 | 22579 | gₛaₛgₛuₛaca gccgaaaggCgagugaGguGCu cggaauu B | 9532 | Zin- |
| | | | | | | | zyme |
| 163 | HCV− | GGUGUACUCACCG | 4731 | 22580 | cₛgₛgₛuₛga cUGAUGaggccguuaggccGaa Uacacc B | 9533 | Amber- |
| | | | | | | | zyme |
| 159 | HCV− | UACUCACCGGUUG | 4732 | 22581 | gₛaₛaₛcₛcg cUGAUGaggccguuaggccGaa Ugagua B | 9534 | Amber- |
| | | | | | | | zyme |
| 140 | HCV− | CCACUAUGGCUCU | 4733 | 22582 | aₛgₛaₛgₛcc cUGAUGaggccguuaggccGaa Uagugg B | 9535 | Amber- |
| | | | | | | | zyme |
| 281 | HCV− | ACCACAAGGCCUU | 4734 | 22583 | aₛaₛgₛgₛcc cUGAUGaggccguuaggccGaa Uguggu B | 9536 | Amber- |
| | | | | | | | zyme |
| 233 | HCV− | GGGGCACGCCCAA | 4735 | 22584 | uₛuₛgₛgₛgc cUGAUGaggccguuaggccGaa Ugcccc B | 9537 | Amber- |
| | | | | | | | zyme |
| 143 | HCV− | AGACCACUAUGGG | 4736 | 22585 | gₛcₛcₛaₛua cUGAUGaggccguuaggccGaa Uggucu B | 9538 | Amber- |
| | | | | | | | zyme |
| 146 | HCV− | CGCAGACCACUAU | 4737 | 22586 | aₛuₛaₛgₛug cUGAUGaggccguuaggccGaa Ucugcg B | 9539 | Amber- |
| | | | | | | | zyme |
| 195 | HCV− | CCAAGAAAGGACG | 4738 | 22587 | gₛgₛuₛcₛcu cUGAUGaggccguuaggccGaa Ucuugg B | 9540 | Amber- |
| | | | | | | | zyme |
| 194 | HCV− | CAAGAAAGGACCG | 4739 | 22588 | gₛgₛgₛuₛcc cUGAUGaggccguuaggccGaa Uucuug B | 9541 | Amber- |
| | | | | | | | zyme |
| 283 | HCV− | GUACCACAAGGCG | 4740 | 22589 | gₛgₛcₛcₛuu cUGAUGaggccguuaggccGaa Ugguac B | 9542 | Amber- |
| | | | | | | | zyme |
| 286 | HCV− | GCAGUACCACAAG | 4741 | 22590 | cₛuₛuₛgₛug cUGAUGaggccguuaggccGaa Uacugc B | 9543 | Amber- |
| | | | | | | | zyme |
| 296 | HCV− | ACCCUAUCAGGCA | 4742 | 22591 | uₛgₛcₛcₛug cUGAUGaggccguuaggccGaa Uagggu B | 9544 | Amber- |
| | | | | | | | zyme |
| 190 | HCV− | AAAGGACCCGGUG | 4743 | 22592 | gₛaₛcₛcₛgg cUGAUGaggccguuaggccGaa Uccuuu B | 9545 | Amber- |
| | | | | | | | zyme |
| 163 | HCV− | CGGUGUACUCACCGG | 4744 | 22593 | cₛcₛgₛgₛuga cUGAUGaggccguuaggccGaa Ucaccg B | 9546 | Amber- |
| | | | | | | | zyme |
| 140 | HCV− | ACCACUAUGGCUCUG | 4745 | 22594 | gₛaₛgₛaₛgcc cUGAUGaggccguuaggCCGaa Uaguggu B | 9547 | Amber- |
| | | | | | | | zyme |
| 159 | HCV− | GUACUCACCGGUUCG | 4746 | 22595 | gₛgₛaₛaₛccg cUGAUGaggccguuaggccGaa Ugaguac B | 9548 | Amber- |
| | | | | | | | zyme |
| 233 | HCV− | GGGGGCACGCCCAAA | 4747 | 22596 | uₛuₛuₛgₛggc cUGAUGaggccguuaggccGaa Ugccccc B | 9549 | Amber- |
| | | | | | | | zyme |
| 143 | HCV− | CAGACCACUAUGGCU | 4748 | 22597 | aₛgₛcₛcₛaua cUGAUGaggccguuaggccGaa Uggucug B | 9550 | Amber- |
| | | | | | | | zyme |
| 146 | HCV− | CCGCAGACCACUAUG | 4749 | 22598 | cₛaₛuₛaₛgug cUGAUGaggccguuaggccGaa Ucugcgg B | 9551 | Amber- |
| | | | | | | | zyme |
| 195 | HCV− | UCCAAGAAAGGACCG | 4750 | 22599 | gₛgₛgₛuₛccu cUGAUGaggccguuaggccGaa Ucuugga B | 9552 | Amber- |
| | | | | | | | zyme |
| 283 | HCV− | AGUACCACAAGGCCU | 4751 | 22600 | aₛgₛgₛcₛcuu cUGAUGaggccguuaggccGaa Ugguacu B | 9553 | Amber- |
| | | | | | | | zyme |
| 281 | HGV− | UACCACAAGGCCUUU | 4752 | 22601 | aₛaₛaₛgₛgcc cUGAUGaggccguuaggccGaa Uguggua B | 9554 | Amber- |
| | | | | | | | zyme |
| 296 | HCV− | CACCCUAUCAGGCAG | 4753 | 22602 | cₛuₛgₛcₛcug cUGAUGaggccguuaggccGaa Uagggug B | 9555 | Amber- |
| | | | | | | | zyme |
| 286 | HCV− | GGCAGUACCACAAGG | 4754 | 22603 | cₛcₛuₛuₛgug cUGAUGaggccguuaggccGaa Uacugcc B | 9556 | Amber- |
| | | | | | | | zyme |
| 7985 | HCV− | UCUCAGU G UCUUCCA | 4765 | 22719 | uggaaga uGAUg gcauGcacuaugc gCg acugaga B | 9557 | G- |
| | | | | | | | cleav- |
| | | | | | | | er |
| 4832 | HCV− | UGUAUAU G CCUCUCC | 4755 | 22720 | ggagagg uGAUg gcauGcacuaugc gCg auauaca B | 9558 | G- |
| | | | | | | | cleav- |
| | | | | | | | er |
| 4153 | HCV− | ACCGUGU G CCUUAGA | 4756 | 22721 | ucuaagg uGAUg gcauGcacuaugc gCg acacggu B | 9559 | G- |
| | | | | | | | cleav- |
| | | | | | | | er |
| 3200 | HCV− | GUGGAGU G AGGUGGU | 4757 | 22722 | accaccu uGAUg gcauGcacuaugc gCg acuccau B | 9560 | G- |
| | | | | | | | cleav- |
| | | | | | | | er |
| 1682 | HCV− | ACGAGUU G AACCUGU | 4758 | 22723 | acagguu uGAUg gcauGcacuaugc gCg aacucgu B | 9561 | G- |
| | | | | | | | cleav- |
| | | | | | | | er |
| 896 | HCV+ | CCUGUCU G ACCAUCG | 4759 | 22724 | ggauggu uGAUg gcauGcacuaugc gCg agacagg B | 9562 | G- |
| | | | | | | | cleav- |
| | | | | | | | er |
| 2504 | HCV+ | UCCUGUU G CUUUUCC | 4762 | 22725 | ggaaaag uGAUg gcauGcacuaugc gCg aacagga B | 9563 | G- |
| | | | | | | | cleav- |
| | | | | | | | er |
| 2651 | HCV− | UCCUCGU G UUCUUCU | 4763 | 22726 | agaagaa uGAUg gcauGcacuaugc gCg acgagga B | 9564 | G- |
| | | | | | | | cleav- |
| | | | | | | | er |
| 4094 | HCV− | ACAAAGU G CUCGUCC | 4760 | 22727 | ggacgag uGAUg gcauGcacuaugc gCg acuuugu B | 9565 | G- |
| | | | | | | | cleav- |
| | | | | | | | er |
| 8970 | HCV+ | GCCACUU G ACCUACC | 4761 | 22728 | gguaggu uGAUg gcauGcacuaugc gCg aaaguggc B | 9566 | G- |
| | | | | | | | cleav- |
| | | | | | | | er |
| 1200 | HCV+ | CUUCCUG G UCUCUCA | 4789 | 22747 | ugagaga gccgaaaggCgagugaGGuCu gaggaag B | 9567 | Zin- |
| | | | | | | | zyme |
| 1211 | HCV− | CUCAGCU G UUCACCU | 4790 | 22748 | aggugaa gccgaaaggCgagugaGGuCu agcugag B | 9568 | Zin- |
| | | | | | | | zyme |
| 2504 | HCV− | UCCUGUU G CUUUUCC | 4762 | 22749 | ggaaaag gccgaaaggCgagugaGGuCu aacagga B | 9569 | Zin- |
| | | | | | | | zyme |
| 2651 | HCV+ | UCCUCGU G UUCUUCU | 4763 | 22750 | agaagaa gccgaaaggCgagugaGGuCu acgagga B | 9570 | Zin- |
| | | | | | | | zyme |
| 8811 | HCV+ | CACUCCA G UCAACUC | 4764 | 22751 | gaguuga gccgaaaggCgagugaGGuCu uggagug B | 9571 | Zin- |
| | | | | | | | zyme |
| 8594 | HCV− | UCGCCGG G UCCUCUU | 4793 | 22752 | aagagga gccgaaaggCgagugaGGuCu gcggcga B | 9572 | Zin- |
| | | | | | | | zyme |
| 7985 | HCV− | UCUCAGU G UCUUCCA | 4765 | 22753 | uggaaga gccgaaaggCgagugaGGuCu acugaga B | 9573 | Zin- |
| | | | | | | | zyme |
| 6611 | HCV− | CCUCCAG G UACUCCU | 4796 | 22754 | aggagua gccgaaaggCgagugaGGuCu guggagg B | 9574 | Zin- |
| | | | | | | | zyme |
| 5633 | HCV− | UCCACAU G UGCUUCG | 4766 | 22755 | cgaagca gccgaaaggCgagugaGGuCu augugga B | 9575 | Zin- |
| | | | | | | | zyme |
| 821 | HCV− | UCACGCG G UCUUCCA | 4767 | 22756 | uggaaga gccgaaaggCgagugaGGuCu ggcguga B | 9576 | Zin- |
| | | | | | | | zyme |
| 870 | HCV+ | CUCUAUG U UCCUCUU | 4768 | 22775 | aagagga CUGAUGAggccguuaggccGAA Iauagag B | 9577 | Ino- |
| | | | | | | | zyme |
| 1210 | HCV+ | UCUCAGG U GUUCACC | 4769 | 22776 | ggugaac CUGAUGAggccguuaggccGAA Icugaga B | 9578 | Ino- |
| | | | | | | | zyme |
| 2642 | HCV+ | UCCUCUC C UUCCUCG | 4770 | 22777 | cgaggaa CUGAUGAggccguuaggccGAA Iagagga B | 9579 | Ino- |
| | | | | | | | zyme |
| 5726 | HCV+ | UCACAGC C UCCAUCA | 4771 | 22778 | ugaugga CUGAUGAggccguuaggccGAA Icuguga B | 9568 | Ino- |
| | | | | | | | zyme |
| 8142 | HCV+ | CUCCACC C UUCCUCA | 4772 | 22779 | ugaggaa CUGAUGAggccguuaggccGAA Iguggag B | 9581 | Ino- |
| | | | | | | | zyme |
| 7990 | HCV− | UGGUGUG U CAGUGUC | 4773 | 22780 | gacacug CUGAUGAggccguuaggccGAA Iacacca B | 9582 | Ino- |
| | | | | | | | zyme |
| 7813 | HCV− | CUUCGCG U UCAUCUC | 4774 | 22781 | gagauga CUGAUGAggccguuaggccGAA Igcgaag B | 9583 | Ino- |
| | | | | | | | zyme |
| 7137 | HCV− | ACCUCUG U CUCAUCC | 4775 | 22782 | ggaugag CUGAUGAggccguuaggccGAA Iagaggu B | 9584 | Ino- |
| | | | | | | | zyme |
| 6084 | HCV− | UUCAUCC A CUGCACA | 4776 | 22783 | ugugcag CUGAUGAggccguuaggccGAA Igaugaa B | 9585 | Ino- |
| | | | | | | | zyme |
| 2554 | HCV− | CAACAGC A UCAUCCA | 4777 | 22784 | uggauga CUGAUGAggccguuaggccGAA Icuguug B | 9586 | Ino- |
| | | | | | | | zyme |
| 1202 | HCV+ | UCCUCGU C UCUCAGC | 4778 | 22943 | gcugaga CUGAUGAggccguuaggccGAA Acgagga B | 9587 | Ham- |
| | | | | | | | mer- |
| | | | | | | | head |
| 1607 | HCV+ | GGCACAU U AACAGGA | 4779 | 22944 | uccuguu CUGAUGAggccguuaggccGAA Augugcc B | 9588 | Ham- |
| | | | | | | | mer- |
| | | | | | | | head |
| 2639 | HCV+ | GCAUCCU C UCCUUCC | 4780 | 22945 | ggaagga CUGAUGAggccguuaggccGAA Aggaugc B | 9589 | Ham- |
| | | | | | | | mer- |
| | | | | | | | head |
| 6610 | HCV+ | GAGGAGU A CGUGGAG | 4781 | 22946 | cuccacg CUGAUGAggccguuaggccGAA Acuccuc B | 9590 | Ham- |
| | | | | | | | mer- |
| | | | | | | | head |
| 9014 | HCV+ | GCGCAUU U UCACUCC | 4782 | 22947 | ggaguga CUGAUGAggccguuaggccGAA Aaugcgc B | 9591 | Ham- |
| | | | | | | | mer- |
| | | | | | | | head |
| 8605 | HCV− | GACUCGU A GGCUCGC | 4783 | 22948 | gcgagcc CUGAUGAggccguuaggccGAA Acgaguc B | 9592 | Ham- |
| | | | | | | | mer- |
| | | | | | | | head |
| 7983 | HCV− | UCAGUGU C UUCCAGC | 4784 | 22949 | gcuggaa CUGAUGAggccguuaggccGAA Acacuga B | 9593 | Ham- |
| | | | | | | | mer- |
| | | | | | | | head |
| 7136 | HCV− | CCUCUCU C UCAUCCU | 4785 | 22950 | aggauga CUGAUGAggccguuaggccGAA Agagagg B | 9594 | Ham- |
| | | | | | | | mer- |
| | | | | | | | head |
| 6609 | HCV− | UCCACGU A CUCCUCA | 4786 | 22951 | ugaggag CUGAUGAggccguuaggccGAA Acgugga B | 9595 | Ham- |
| | | | | | | | mer- |
| | | | | | | | head |
| 6292 | HCV− | CGUGCAU A UCCAGUC | 4787 | 22952 | gacugga CUGAUGAggccguuaggccGAA Augcacg B | 9596 | Ham- |
| | | | | | | | mer- |
| | | | | | | | head |
| 867 | HCV+ | UUUCUCU A UCUUCCU | 4788 | 22971 | aggaaga GGCTAGCTACAACGA agagaaa B | 9597 | DNA- |
| | | | | | | | zyme |
| 1200 | HCV+ | CUUCCUG G UCUCUCA | 4789 | 22972 | ugagaga GGCTAGCTACAACGA gaggaag B | 9598 | DNA- |
| | | | | | | | zyme |
| 1211 | HCV+ | CUCAGCU G UUCACCU | 4790 | 22973 | aggugaa GGCTAGCTACAACGA agcugag B | 9599 | DNA- |
| | | | | | | | zyme |
| 5730 | HCV+ | AGCCUCC A UCACCAG | 4791 | 22974 | cugguga GGCTAGCTACAACGA ggaggcu B | 9600 | DNA- |
| | | | | | | | zyme |
| 6533 | HCV+ | UCAACGC A UACACCA | 4792 | 22975 | uggugua GGCTAGCTACAACGA gcguuga B | 9601 | DNA- |
| | | | | | | | zyme |
| 8594 | HCV− | UCGCCGG G UCCUCUU | 4793 | 22976 | aagagga GGCTAGCTACAACGA gcggcga B | 9602 | DNA- |
| | | | | | | | zyme |
| 7810 | HCV− | CGCCUUC A UCUCCUU | 4794 | 22977 | aaggaga GGCTAGCTACAACGA gaaggcg B | 9603 | DNA- |
| | | | | | | | zyme |
| 7133 | HCV− | CUCUCUC A UCCUCCU | 4795 | 22978 | aggagga GGCTAGCTACAACGA gagagag B | 9604 | DNA- |
| | | | | | | | zyme |
| 6611 | HCV− | CCUCCAG G UACUCCU | 4796 | 22979 | aggagua GGCTAGCTACAACGA guggagg B | 9605 | DNA- |
| | | | | | | | zyme |
| 2300 | HCV− | CCUCCAA A UCACAAC | 4797 | 22980 | guuguga GGCTAGCTACAACGA uuggagg B | 9606 | DNA- |
| | | | | | | | zyme |
| 195 | HCV+ | GGGUCCU U UCUUGGA | 4556 | 23072 | cₛcₛaₛaₛga cUGAuGaggcgWWagccGaa Aggacc B | 9607 | Ham- |
| | | | | | | | mer- |
| | | | | | | | head |
| 195 | HCV+ | GGGUCCU U UCUUGGA | 45562 | 23076 | WWWWWcₛcₛaₛaₛga cUGAuGaggcgWWWagccGaa Aggacc B | 9608 | Ham- |
| | | | | | | | mer- |
| | | | | | | | head |
| 195 | HCV+ | GGGUCCU U UCUUGGA | 45562 | 23077 | WWWcₛcₛaₛaₛga cUGAuGaggcgWWWagccGaa Aggacc B | 9609 | Ham- |
| | | | | | | | mer- |
| | | | | | | | head |
| 195 | HCV+ | GGGUCCU U UCUUGGA | 45562 | 23086 | cₛcₛaₛaₛga cUGAuGaggcgWWWagccGa Aggacc B | 9610 | Ham- |
| | | | | | | | mer- |
| | | | | | | | head |

lower case = 2′-O-methyl
UPPER CASE = RIBO
B = inverted deoxy abasic
U = 2′-deoxy-2′-amino Uridine
C = 2′-deoxy-2′-amino Cytidine
U = 2′-deoxy-2′-amino Uridine
Z = BRdU (5-bromo-2′-deoxy Uridine)
W = acyclic galactoe-amine linker
UNDERLINE = deoxy nuclectide

[0392] TABLE VI
Anti HCV amino containing hammerhead ribozyme and control sequence

| | | HCV 5′UTR | | | Rz Seq |
|---|---|---|---|---|---|
| pos | RPI# | Site | | Core | ID |
| | | | Ribozyme Sequences (5′-3′) | | |
| 621 | 2257 | HCV-62 | gₛcₛgₛugaa cUGAUGaggccguuaggccGaa AcaguagB | Active | 9611 |
| 791 | 2258 | HCV-79 | aₛuₛgₛgcua cUGAUGaggccguuaggccGaa AcgcuuuB | Active | 9612 |
| 811 | 2249 | HCV-81 | cₛcₛaₛuggc cUGAUGaggccguuaggccGaa AgacgcuB | Active | 9613 |
| 1041 | 2259 | HCV-104 | gₛcₛuₛgcac cUGAUGaggccguuaggccGaa AcacucaB | Active | 9614 |
| 1421 | 2250 | HCV-142 | aₛgₛaₛccac cUGAUGaggccguuaggCCGaa AuggcucB | Active | 9615 |
| 1481 | 2251 | HCV-148 | uₛuₛcₛcgca cUGAUGaggccguuaggccGaa AccacuaB | Active | 9616 |
| 1651 | 2260 | HCV-165 | uₛcₛcₛggug cUGAUGaggccguuaggccGaa AcucaccB | Active | 9617 |
| 1921 | 2261 | HCV-192 | aₛaₛgₛaaa9 cUGAUGaggccguuaggccGaa AcccgguB | Active | 9618 |
| 1951 | 2252 | HCV-195 | uₛcₛcₛaaga cUGAUGaggccguuaggccGaa AggacccB | Active | 9619 |
| 1961 | 2262 | HCV-196 | aₛuₛcₛcaag cUGAUGaggccguuaggccGaa AaggaccB | Active | 9620 |
| 2701 | 2263 | HCV-270 | cₛuₛuₛucgc cUGAUGaggccguuaggccGaa AcccaacB | Active | 9621 |
| 2821 | 2264 | HCV-282 | Bₛuₛaₛccac cUGAUGaggccguuaggccGaa AggccuuB | Active | 9622 |
| 3061 | 2265 | HCV-306 | cₛaₛcₛucgc cUGAUGaggccguuaggccGaa AgcacccB | Active | 9623 |
| 3251 | 2253 | HCV-325 | uₛcₛuₛacga cUGAUGaggccguuaggccGaa AccucccB | Active | 9624 |
| 3301 | 2254 | HCV-330 | cₛaₛcₛgguc cUGAUGaggccguuaggccGaa AcgagacB | Active | 9625 |
| | | | Control Sequence | | |
| 79 | 13274 | HCV-79 AC2 | cₛuₛuₛaggu cUAGUGaggccguuaggccGau AguucucB | Attenuated | 9626 |
| 81 | 13271 | HCV-81 AC | uₛcₛuₛgccg cUAGUGaggccguuaggccGau AgugaccB | Attenuated | 9627 |
| 142 | 13270 | HCV-142 AC | aₛaₛcₛccu9 cUAGUGaygcc9uuaggccGau AgcucguB | Attenuated | 9628 |
| 192 | 13272 | HCV-192 AC | aₛgₛuₛagaa cUAGUGaggccguuaggccGaU AgcugccB | Attenuated | 9629 |
| 195 | 13269 | HCV195 AC | gₛaₛuₛucca cUAGUGaggccguuaggccGaU AcgcgacB | Attenuated | 9630 |
| 282 | 13273 | HCV-282 AC | gₛcₛcₛauuc cUAGUGaggccguuaggccGaU AucuggcB | Attenuated | 9631 |
| 330 | 13268 | HCV-330 AC | cₛcₛaₛggcu cUAGUGaggccguuaggccGau AaugcgcB | Attenuated | 9632 |
| 195 | 15291 | HCV-195 BAC3 | uₛcₛcₛaaga cUAGUGacgccguuaggcgGaa AggacccB | Attenuated | 9633 |
| 195 | 15292 | HCV-195 SAC3 | aₛgₛaₛcuac cUAGUGacgccguuaggcgGaa AcccgagB | Attenuated | 9634 |
| 330 | 15294 | HCV-330 BAC | cₛaₛcₛgguc cUAGUGacgccguuaggcgGaa AcgagacB | Attenuated | 9635 |
| 330 | 15295 | HCV-330 SAC | gₛcₛuₛccga cUAGUGacgccguuaggcgGaa AgacacgB | Attenuated | 9636 |

UPPER CASE = RIBO; lower case = 2′-O-methyl; B = inverted deoxyabasic; s = phosphorothioate linkage U = 2′-deoxy-2′-amino uridine

[0393] TABLE VII
Anti HCV site 330 antisense nucleic acid and scrambled control sequence

| pos | RPI# | Alias | | Seq ID # |
|---|---|---|---|---|
| | | | Antisense Nucleic Acid | |
| 330 | 17501 | HCV.5-330 | GₛTₛGₛ CₛTₛCₛ AₛTₛGₛ AₛTₛGₛ CₛAₛCₛ GₛGₛTₛ CₛT | 9353 |
| | | antisense | | |
| 330 | 17499 | HCV.5-330 | GₛTₛGₛ CₛTₛcₛ AₛTₛGₛ GₛTₛGₛ cₛAₛcₛ GₛGₛTₛ CₛT | 9637 |
| | | antisense | | |
| | | | Control Sequence | |
| 330 | 17499 | HCV.5-330 scrambled | TₛGₛAₛ TₛcₛAₛ GₛGₛTₛ CₛTₛGₛ CₛTₛGₛ cₛGₛTₛ GₛC | 9638 |
| 330 | 17502 | HCV.5-330 scrambled | TₛGₛAₛTₛcₛAₛGₛGₛTₛcₛTₛGₛcₛTₛGₛcₛAₛTₛGₛG | 9639 |

UPPER CASE = Deoxy Nuclectide
s = phosphorothioate

[0394] TABLE VIII
In Vitro Cleavage Data, anti-HCV Enzymatic Nucleic Acid

| | | | | | % Sub- | | | |
|---|---|---|---|---|---|---|---|---|
| | | | | | strate | | | |
| | | | | | Cleav- | | | |
| Seq | | | Site | | ed in | | Seq | Sub- |
| ID | | | (+/ | | 3 | | ID | strate |
| # | RPI# | Motif | −) | Enzymatic Nucleic Acid Sequence | hours | Substrate Sequence | # | RPI# |
| 9587 | 22943 | Hammer- | 1190 | gcugaga CUGAUGAggccguuaggccGAA Acgagga B | 89.67 | UCCUCGU C UCUCAGC B | 9640 | 22897 |
| | head | (+) | | | | | | |
| 9588 | 22944 | Hammer- | 1595 | uccuguu CUGAUGAggccguuaggccGAA Augugga B | 90.33 | GGCACAU U AACAGGA B | 9641 | 22898 |
| | head | (+) | | | | | | |
| 9589 | 22945 | Hammer- | 2627 | ggaagga CUGAUGAggccguuaggccGAA Aggaugc B | 82.54 | GCAUCCU C UCCUUCC B | 9642 | 22899 |
| | head | (+) | | | | | | |
| 9590 | 22946 | Hammer- | 6598 | cuccacg CUGAUGAggccguuaggccGAA Acuccuc B | 78.06 | GAGGAGU A CGUGGAG B | 9643 | 22900 |
| | head | (+) | | | | | | |
| 9591 | 22947 | Hammer- | 9002 | ggaguga CUGAUGAggccguuaggccGAA Aaugcgc B | 81.88 | GCGCAUU U UCACUCC B | 9644 | 22901 |
| | head | (+) | | | | | | |
| 9592 | 22948 | Hammer- | 818 | gcgagcc CUGAUGAggccguuaggccGAA Acgaguc B | 88.34 | GACUCGU A GGCUCGC B | 9645 | 22902 |
| | head | (−) | | | | | | |
| 9593 | 22949 | Hammer- | 1440 | gcuggaa CUGAUGAggccguuaggccGAA Acacuga B | 89.16 | UCAGUGU C UUCCAGC B | 9646 | 22903 |
| | head | (−) | | | | | | |
| 9594 | 22950 | Hammer- | 2287 | aggauga CUGAUGAggccguuaggccGAA Agagagg B | 83.43 | CCUCUCU C UCAUCCU B | 9647 | 22904 |
| | head | (−) | | | | | | |
| 9595 | 22951 | Hammer- | 2814 | ugaggag CUGAUGAggccguuaggccGAA Acgugga B | 83.25 | UCCACGU A CUCCUCA B | 9648 | 22905 |
| | head | (−) | | | | | | |
| 9596 | 22952 | Hammer- | 3131 | gacugga CUGAUGAggccguuaggccGAA Augcacg B | 86.96 | CGUGCAU A UCCAGUC B | 9649 | 22906 |
| | head | (−) | | | | | | |
| 9597 | 22971 | DNAzyme | 855 | aggaaga GGCTAGCTACAACGA agagaaa B | 92.11 | UUUCUCU A UCUUCCU B | 22925 | |
| | | | (+) | | | | | |
| 9598 | 22972 | CNAzyme | 1188 | ugagaga GGCTAGCTACAACGA gaggaag B | 86.38 | CUUCCUC G UCUCUCA B | 22926 | |
| | | | (+) | | | | | |
| 9599 | 22973 | DNAzyme | 1199 | aggugaa GGCTAGCTACAACGA agcugag B | 83.15 | CUCAGCU G UUCACCU B | 22927 | |
| | | | (+) | | | | | |
| 9600 | 22974 | DNAzyme | 5718 | cugguga GGCTAGCTACAACGA ggaggcu B | 57.82 | AGCCUCC A UCACCAG B | 22928 | |
| | | | (+) | | | | | |
| 9601 | 22975 | DNAzyme | 6521 | uggugua GGCTAGCTACAACGA gcguuga B | 75.77 | UCAACGC A UACACCA B | 22929 | |
| | | | (+) | | | | | |
| 9602 | 22976 | DNAzyme | 829 aagagga GGCTAGCTACAACGA gcggcga B | 66.06 | UCGCCGC G UCCUCUU B | 22930 | | |
| | | | (−) | | | | | |
| 9603 | 22977 | DNAzyme | 1613 | aaggaga GGCTAGCTACAACGA gaaggcg B | 71.28 | CGCCUUC A UCUCCUU B | 22931 | |
| | | | (−) | | | | | |
| 9604 | 22978 | DNAzyme | 2290 | aggagga GGCTAGCTACAACGA gagagag B | 61.60 | CUCUCUC A UCCUCCU B | 22932 | |
| | | | (−) | | | | | |
| 96G5 | 22979 | DNAzyme | 2812 | aggagua GGCTAGCTACAACGA guggagg B | 85.53 | CCUCCAC G UACUCCU B | 22933 | |
| | | | (−) | | | | | |
| 9606 | 22980 | DNAzyme | 7123 | guuguga GGCTAGCTACAACGA uuggagg B | 34.60 | CCUCCAA A ACACAAC B | 22934 | |
| | | | (−) | | | | | |
| 9557 | 22719 | G- | 1438 | uggaaga uGAUg gcauGcacuaugc gCg acugaga B | 69.88 | UCUCAGU G UCUUCCA B | | |
| | cleaver | (+) | | | | | | |
| 9558 | 22720 | G- | 4591 | ggagagg uGAUg gcauGcacuaugc gCg auauaca B | 77.74 | UGUAUAU G CCUCUCC B | | |
| | cleaver | (+) | | | | | | |
| 9559 | 22721 | G- | 5270 | ucuaagg uGAUg gcauGcacuaugc gCg acacggu B | 47.37 | ACCGUGU G CCUUAGA B | | |
| | cleaver | (+) | | | | | | |
| 9560 | 22722 | G- | 6223 | accaccu uGAUg gcauccacuaugc gCg acuccac B | 75.84 | GUGGAGU G AGGUGGU B | | |
| | cleaver | (+) | | | | | | |
| 9561 | 22723 | G- | 7741 | acagguu uGAUg gcauccacuaugc gCg aacucgu B | 61.58 | ACGAGUU G AACCUGU B | | |
| | cleaver | (+) | | | | | | |
| 9562 | 22724 | G- | 884 | ggauggu uGAUg gcauGcacuaugc gCg agacagg B | 65.16 | CCUGUCU G ACCAUCC B | | |
| | cleaver | (−) | | | | | | |
| 9563 | 22725 | G- | 2492 | ggaaaag uGAUg gcauGcacuaugc gCg aacagga B | 94.66 | UCCUGUU G CUUUUCC B | | |
| | cleaver | (−) | | | | | | |
| 9564 | 22726 | G- | 2639 | agaagaa uGAUg gcauGcacuaugc gCg acgagga B | 82.14 | UCCUGUU G CUUUUCC B | | |
| | cleaver | (−) | | | | | | |
| 9565 | 22727 | G- | 4082 | ggacgag uGAUg gcauccacuaugc gCg acuuugu B | 67.20 | ACAAAGU G CUCGUCC B | | |
| | cleaver | (−) | | | | | | |
| 9566 | 22728 | G- | 8958 | gguaggu uGAUg gcauccacuaugc gCg aaguggc B | 81.06 | GCCACUU G ACCUACC B | | |
| | cleaver | (−) | | | | | | |
| 9567 | 22747 | Zinzyme | 1188 | ugagaga gccgaaaggCgagugaGGuCu gaggaag B | 66.11 | CUUCCUC G UCUCUCA B | | |
| | | | (+) | | | | | |
| 9568 | 22748 | Zinzyme | 1199 | aggugaa gccgaaaggCgagugaGGuCu agcugag B | 80.28 | CUCAGCU G UUCACCU B | | |
| | | | (+) | | | | | |
| 9569 | 22749 | Zinzyme | 2492 | ggaaaag gccgaaaggCgagugaGGuCu aacagga B | 90.80 | UCCUGUU G CUUUUCC B | | |
| | | | (+) | | | | | |
| 9570 | 22750 | Zinzyme | 2639 | agaagaa gccgaaaggCgagugaGGuCu acgagga B | 80.64 | UCCUCGU G UUCUUCU B | | |
| | | | (+) | | | | | |
| 9571 | 22751 | Zinzyme | 8799 | gaguuga gccgaaaggCgagugaGGuCu uggagug B | 14.85 | CACUCCA G UCAACUC B | | |
| | | | (+) | | | | | |
| 9572 | 22752 | Zinzyme | 829 | aagagga gccgaaaggCgagugaGGuCu gcggcga B | 27.83 | UCGCCGC G UCCUCUU B | | |
| | | | (−) | | | | | |
| 9573 | 22753 | Zinzyme | 1438 | uggaaga gccgaaaggCgagugaGGuCu acugaga B | 89.39 | UCUCAGU G UCUUCCA B | | |
| | | | (−) | | | | | |
| 9574 | 22754 | Zinzyme | 2812 | aggagua gccgaaaggCgagugaGGuCu guggagg B | 50.40 | CCUCCAC G UACUCCU B | | |
| | | | (−) | | | | | |
| 9575 | 22755 | Zinzyme | 3790 | cgaagca gccgaaaggCgagugaGGuCu augugga B | 81.10 | UCCACAU G UGCUUCG B | | |
| | | | (−) | | | | | |
| 9576 | 22756 | Zinzyme | 8602 | uggaaga gccgaaaggCgagugaGGuCu ggcguga B | 73.47 | UCACGCC G UCUUCCA B | | |
| | | | (−) | | | | | |
| 9577 | 22775 | Inozyme | 858 | aagagga CUGAUGAggccguuaggccGAA Iauagag B | 87.74 | CUCUAUC U UCCUCUU B | | |
| | | | (+) | | | | | |
| 9578 | 22776 | Inozyme | 1198 | ggugaac CUGAUGAggccguuaggccGAA Icugaga B | 84.55 | UCUCAGC U UCCUCUU B | | |
| | | | (+) | | | | | |
| 9579 | 22777 | Inozyme | 2630 | cgaggaa CUGAUGAggccguuaggccGAA Iagagga B | 90.12 | UCCUCUC C UUCCUCG B | | |
| | | | (+) | | | | | |
| 9580 | 22778 | Inozyme | 5714 | ugaugga CUGAUGAggccguuaggccGAA Icuguga B | 83.77 | UCACAGC C UCCAUCA B | | |
| | | | (+) | | | | | |
| 9581 | 22779 | Inozyme | 8130 | ugaggaa CUGAUGAggccguuaggccGAA Iguggag B | 82.22 | CUCCACC C UUCCUCA B | | |
| | | | (+) | | | | | |
| 9582 | 22780 | Inozyme | 1433 | gacacug CUGAUGAggccguuaggccGAA Iacacca B | 87.33 | UGGUGUC U CAGUGUC B | | |
| | | | (−) | | | | | |
| 9583 | 22781 | Inozyme | 1610 | gagauga CUGAUGAggccguuaggccGAA Igcgaag B | 70.67 | CUUCGCC U UCAUCUC B | | |
| | | | (−) | | | | | |
| 9584 | 22782 | Inozyme | 2286 | ggaugag CUGAUGAggccguuaggccGAA Iagaggu B | 78.83 | ACCUCUC U CUCAUCC B | | |
| | | | (−) | | | | | |
| 9585 | 22783 | Inozyme | 3339 | ugugcag GUGAUGAggccguuaggccGAA Igaugaa B | 86.93 | UUCAUCC A CUGCACA B | | |
| | | | (−) | | | | | |
| 9586 | 22784 | Inozyme | 6869 | uggauga CUGAUGAggccguuaggccGAA Icuguug B | 90.41 | CAACAGC A UCAUCCA B | | |
| | | | (−) | | | | | |

In vitro cleavage in 50 mM Tris-Cl, pH 8.0, 40 mM Mg²⁺ at 37°, using trace substrate, and enzymatic nucleic acid concentration of 500 nM or greater.
UPPER CASE = RIBO
UNDERLINED = DEOXY
lower case = 2′-O-methyl
B = inverted deoxyabasic
C = 2′-amino C
(+/−) = plus strand/minus strand of HCV genome

[0395] All patents and publications mentioned in the specification are indicative of the levels of skill of those skilled in the art to which the invention pertains. All references cited in this disclosure are incorporated by reference to the same extent as if each reference had been incorporated by reference in its entirety individually.

[0396] One skilled in the art would readily appreciate that the present invention is well adapted to carry out the objects and obtain the ends and advantages mentioned, as well as those inherent therein. The methods and compositions described herein as presently representative of preferred embodiments are exemplary and are not intended as limitations on the scope of the invention. Changes therein and other uses will occur to those skilled in the art, which are encompassed within the spirit of the invention, are defined by the scope of the claims.

[0397] It will be readily apparent to one skilled in the art that varying substitutions and modifications can be made to the invention disclosed herein without departing from the scope and spirit of the invention. Thus, such additional embodiments are within the scope of the present invention and the following claims.

[0398] The invention illustratively described herein suitably can be practiced in the absence of any element or elements, limitation or limitations which is not specifically disclosed herein. Thus, for example, in each instance herein any of the terms “comprising”, “consisting essentially of” and “consisting of” can be replaced with either of the other two terms. The terms and expressions which have been employed are used as terms of description and not of limitation, and there is no intention that in the use of such terms and expressions of excluding any equivalents of the features shown and described or portions thereof, but it is recognized that various modifications are possible within the scope of the invention claimed. Thus, it should be understood that although the present invention has been specifically disclosed by preferred embodiments, optional features, modification and variation of the concepts herein disclosed can be resorted to by those skilled in the art, and that such modifications and variations are considered to be within the scope of this invention as defined by the description and the appended claims.

[0399] In addition, where features or aspects of the invention are described in terms of Markush groups or other grouping of alternatives, those skilled in the art will recognize that the invention is also thereby described in terms of any individual member or subgroup of members of the Markush group or other group.

[0400] Other embodiments are within the following claims.

What we claim is:

1. A compound having Formula I: [chemical structure]
wherein X₁ is an integer of 1, 2, or 3; X₂ is an integer greater than or equal to 1; R₆ independently represents a 3′-ribofuranose sugar moiety; each R₁ and R₂ independently represent non-bridging phosphate moieties; each R₃, R₄ and R₈ independently represent a bridging phosphate moiety; and R₅ represents an alkyl or alkylamine group, or an oligonucleotide comprising any of SEQ ID NOs. 4798-9637, an oligonucleotide having a sequence complementary to a sequence comprising SEQ ID NOs. 1-4556, or abasic moiety.

2. The compound of claim 1, wherein R₆ independently represents H, OH, NH₂, O NH₂, alkyl, S-alkyl, O-alkyl, O-alkyl-S-alkyl, O-alkoxyalkyl, allyl, O-allyl, or fluoro.

3. The compound of claim 1, wherein each R₁ and R₂ independently represent O, alkyl, O-alkyl, or S.

4. The compound of claim 1, wherein R₃, R₄ and R₈ independantly represent O, N, alkyl, fluoroalkyl, or S.

5. The compound of claim 1, wherein said oligonucleotide comprising a sequence complementary to any of SEQ ID NOS. 1-4556 is an enzymatic nucleic acid molecule.

6. The compound of claim 1, wherein said oligonucleotide comprising a sequence complementary to any of SEQ ID NOS. 1-4556 is an antisense nucleic acid molecule.

7. The compound of claim 2, wherein said enzymatic nucleic acid molecule is selected from the group consisting of Hammerhead, Inozyme, G-cleaver, DNAzyme, Amberzyme, and Zinzyme motifs.

8. The compound of claim 4, wherein said Inozyme enzymatic nucleic acid molecule comprises a stem II region of length greater than or equal to 2 base pairs.

9. The compound of claim 5, wherein said enzymatic nucleic acid comprises between 12 and 100 bases complementary to an RNA derived from HCV.

10. The compound of claim 5, wherein said enzymatic nucleic acid comprises between 14 and 24 bases complementary to an RNA derived from HCV.

11. The compound of claim 6, wherein said antisense nucleic acid comprises between 12 and 100 bases complementary to an RNA derived from HCV.

12. The compound of claim 6, wherein said antisense nucleic acid comprises between 14 and 24 bases complementary to an RNA derived from HCV.

13. A pharmaceutical composition comprising the compound of claim 1, in a pharmaceutically acceptable carrier.

14. A mammalian cell comprising a compound of claim 1.

15. The mammalian cell of claim 14, wherein said mammalian cell is a human cell.

16. A method for treatment of cirrhosis, liver failure or hepatocellular carcinoma comprising the step of administering to a patient a compound of claim 1, under conditions suitable for said treatment.

17. A method of treatment of a patient having a condition associated with HCV infection comprising contacting cells of said patient with a compound of claim 1, and further comprising contacting said cells with one or more other therapeutic compounds under conditions suitable for said treatment.

18. A method for inhibiting HCV replication in a mammalian cell comprising the step of administering to said cell the compound of claim 1 under conditions suitable for said inhibition.

19. A method of cleaving a separate RNA molecule comprising contacting the compound of claim 1 with said separate RNA molecule under conditions suitable for the cleavage of said separate RNA molecule.

20. The method of claim 19, wherein said cleavage is carried out in the presence of a divalent cation.

21. The method of claim 20, wherein said divalent cation is Mg²⁺.

22. The method of claim 19, wherein said cleavage is carried out in the presence of a protein nuclease.

23. The method of claim 22, wherein said protein nuclease is an RNAse L nuclease.

24. The compound of claim 1, wherein said compound is chemically synthesized.

25. The compound of claim 1, wherein said oligonucleotide comprises at least one 2′-sugar modification.

26. The compound of claim 1, wherein said oligonucleotide comprises at least one nucleic acid base modification.

27. The compound of claim 1, wherein said oligonucleotide comprises at least one phosphate modification.

28. The method of claim 17, wherein said therapeutic compound is type I interferon.

29. The method of claim 28, wherein said type I interferon and the compound of claim 1 are administered simultaneously.

30. The method of claim 28, wherein said type I interferon and the compound of claim 1 are administered separately.

31. The method of claim 28, wherein said type I interferon is interferon alpha.

32. The method of claim 28, wherein said type I interferon is interferon beta.

33. The method of claim 28, wherein said type I interferon is consensus interferon.

34. The method of claim 28, wherein said type I interferon is polyethylene glycol interferon.

35. The method of claim 28, wherein said type I interferon is polyethylene glycol interferon alpha 2a.

36. The method of claim 28, wherein said type I interferon is polyethylene glycol interferon alpha 2b.

37. The method of claim 28, wherein said type I interferon is polyethylene glycol consensus interferon.

38. The method of claim 17, wherein R₅ in compound 1 is selected from the group consisting of alkyl, alkylamine and abasic moiety and said other therapeutic compound comprises an enzymatic nucleic acid molecule which is targeted against HCV replication.

39. The method of claim 17, wherein R₅ in compound 1 is selected from the group consisting of alkyl, alkylamine and abasic moiety and said other therapeutic compound comprises an antisense nucleic acid molecule which is targeted against HCV replication.

40. A pharmaceutical composition comprising type I interferon and the compound of claim 1, in a pharmaceutically acceptable carrier.

41. The compound of claim 1, wherein said abasic moiety is selected from the group consisting of: [chemical structure]
wherein R₈ is R₈ shown in Formula I and R₇ independently represents a ribofuranose sugar moiety.

42. The compound of claim 41, wherein R₇ represents H, OH, NH₂, O—NH₂, alkyl, S-alkyl, O-alkyl, O-alkyl-S-alkyl, O-alkoxyalkyl, allyl, O-allyl, fluoro, oligonucleotide, alkyl, alkylamine or abasic moiety.

The application's sequence listing, which the Patent Office published only in electronic form, follows.

SEQUENCE LISTING (9703 sequences)

SEQ ID NO: 1 - RNA, 17 nt, artificial sequence
  misc_feature: oligonucleotide substrate
ugggggcgacacuccac

SEQ ID NO: 2 - RNA, 17 nt, artificial sequence
  misc_feature: oligonucleotide substrate
ggggcgacacuccacca

SEQ ID NO: 3 - RNA, 17 nt, artificial sequence
  misc_feature: oligonucleotide substrate
gacacuccaccauagau

SEQ ID NO: 4 - RNA, 17 nt, artificial sequence
  misc_feature: oligonucleotide substrate
acuccaccauagaucac

SEQ ID NO: 5 - RNA, 17 nt, artificial sequence
  misc_feature: oligonucleotide substrate
caccauagaucacuccc

SEQ ID NO: 6 - RNA, 17 nt, artificial sequence
  misc_feature: oligonucleotide substrate
cauagaucacuccccug

SEQ ID NO: 7 - RNA, 17 nt, artificial sequence
  misc_feature: oligonucleotide substrate
acuccccugugaggaac

SEQ ID NO: 8 - RNA, 17 nt, artificial sequence
  misc_feature: oligonucleotide substrate
ugugaggaacuacuguc

SEQ ID NO: 9 - RNA, 17 nt, artificial sequence
  misc_feature: oligonucleotide substrate
gaggaacuacugucuuc

SEQ ID NO: 10 - RNA, 17 nt, artificial sequence
  misc_feature: oligonucleotide substrate
gaacuacugucuucacg

SEQ ID NO: 11 - RNA, 17 nt, artificial sequence
  misc_feature: oligonucleotide substrate
cugucuucacgcagaaa

SEQ ID NO: 12 - RNA, 17 nt, artificial sequence
  misc_feature: oligonucleotide substrate
gucuucacgcagaaagc

SEQ ID NO: 13 - RNA, 17 nt, artificial sequence
  misc_feature: oligonucleotide substrate
cgcagaaagcgucuagc

SEQ ID NO: 14 - RNA, 17 nt, artificial sequence
  misc_feature: oligonucleotide substrate
cagaaagcgucuagcca

SEQ ID NO: 15 - RNA, 17 nt, artificial sequence
  misc_feature: oligonucleotide substrate
agcgucuagccauggcg

SEQ ID NO: 16 - RNA, 17 nt, artificial sequence
  misc_feature: oligonucleotide substrate
gucuagccauggcguua

SEQ ID NO: 17 - RNA, 17 nt, artificial sequence
  misc_feature: oligonucleotide substrate
uagccauggcguuagua

SEQ ID NO: 18 - RNA, 17 nt, artificial sequence
  misc_feature: oligonucleotide substrate
gccauggcguuaguaug

SEQ ID NO: 19 - RNA, 17 nt, artificial sequence
  misc_feature: oligonucleotide substrate
uggcguuaguaugagug

SEQ ID NO: 20 - RNA, 17 nt, artificial sequence
  misc_feature: oligonucleotide substrate
gcguuaguaugaguguc

SEQ ID NO: 21 - RNA, 17 nt, artificial sequence
  misc_feature: oligonucleotide substrate
uaguaugagugucgugc

SEQ ID NO: 22 - RNA, 17 nt, artificial sequence
  misc_feature: oligonucleotide substrate
guaugagugucgugcag

SEQ ID NO: 23 - RNA, 17 nt, artificial sequence
  misc_feature: oligonucleotide substrate
ugagugucgugcagccu

SEQ ID NO: 24 - RNA, 17 nt, artificial sequence
  misc_feature: oligonucleotide substrate
agugucgugcagccucc

SEQ ID NO: 25 - RNA, 17 nt, artificial sequence
  misc_feature: oligonucleotide substrate
gucgugcagccuccagg

SEQ ID NO: 26 - RNA, 17 nt, artificial sequence
  misc_feature: oligonucleotide substrate
ccuccaggacccccccu

SEQ ID NO: 27 - RNA, 17 nt, artificial sequence
  misc_feature: oligonucleotide substrate
ccgggagagccauagug

SEQ ID NO: 28 - RNA, 17 nt, artificial sequence
  misc_feature: oligonucleotide substrate
ggagagccauagugguc

SEQ ID NO: 29 - RNA, 17 nt, artificial sequence
  misc_feature: oligonucleotide substrate
gagccauaguggucugc

SEQ ID NO: 30 - RNA, 17 nt, artificial sequence
  misc_feature: oligonucleotide substrate
ccauaguggucugcgga

SEQ ID NO: 31 - RNA, 17 nt, artificial sequence
  misc_feature: oligonucleotide substrate
aguggucugcggaaccg

SEQ ID NO: 32 - RNA, 17 nt, artificial sequence
  misc_feature: oligonucleotide substrate
ucugcggaaccggugag

SEQ ID NO: 33 - RNA, 17 nt, artificial sequence
  misc_feature: oligonucleotide substrate
cggaaccggugaguaca

SEQ ID NO: 34 - RNA, 17 nt, artificial sequence
  misc_feature: oligonucleotide substrate
accggugaguacaccgg

SEQ ID NO: 35 - RNA, 17 nt, artificial sequence
  misc_feature: oligonucleotide substrate
cggugaguacaccggaa

SEQ ID NO: 36 - RNA, 17 nt, artificial sequence
  misc_feature: oligonucleotide substrate
gugaguacaccggaauu

SEQ ID NO: 37 - RNA, 17 nt, artificial sequence
  misc_feature: oligonucleotide substrate
acaccggaauugccagg

SEQ ID NO: 38 - RNA, 17 nt, artificial sequence
  misc_feature: oligonucleotide substrate
ccggaauugccaggacg

SEQ ID NO: 39 - RNA, 17 nt, artificial sequence
  misc_feature: oligonucleotide substrate
uugccaggacgaccggg

SEQ ID NO: 40 - RNA, 17 nt, artificial sequence
  misc_feature: oligonucleotide substrate
ccaggacgaccgggucc

SEQ ID NO: 41 - RNA, 17 nt, artificial sequence
  misc_feature: oligonucleotide substrate
acgaccggguccuuucu

SEQ ID NO: 42 - RNA, 17 nt, artificial sequence
  misc_feature: oligonucleotide substrate
uuucuuggaucaacccg

SEQ ID NO: 43 - RNA, 17 nt, artificial sequence
  misc_feature: oligonucleotide substrate
uuggaucaacccgcuca

SEQ ID NO: 44 - RNA, 17 nt, artificial sequence
  misc_feature: oligonucleotide substrate
aucaacccgcucaaugc

SEQ ID NO: 45 - RNA, 17 nt, artificial sequence
  misc_feature: oligonucleotide substrate
cccgcucaaugccugga

SEQ ID NO: 46 - RNA, 17 nt, artificial sequence
  misc_feature: oligonucleotide substrate
cgcucaaugccuggaga

SEQ ID NO: 47 - RNA, 17 nt, artificial sequence
  misc_feature: oligonucleotide substrate
gccuggagauuugggcg

SEQ ID NO: 48 - RNA, 17 nt, artificial sequence
  misc_feature: oligonucleotide substrate
agauuugggcgugcccc

SEQ ID NO: 49 - RNA, 17 nt, artificial sequence
  misc_feature: oligonucleotide substrate
auuugggcgugcccccg

SEQ ID NO: 50 - RNA, 17 nt, artificial sequence
  misc_feature: oligonucleotide substrate
uugggcgugcccccgcg

SEQ ID NO: 51 - RNA, 17 nt, artificial sequence
  misc_feature: oligonucleotide substrate
gugcccccgcgagacug

SEQ ID NO: 52 - RNA, 17 nt, artificial sequence
  misc_feature: oligonucleotide substrate
cccgcgagacugcuagc

SEQ ID NO: 53 - RNA, 17 nt, artificial sequence
  misc_feature: oligonucleotide substrate
gcgagacugcuagccga

SEQ ID NO: 54 - RNA, 17 nt, artificial sequence
  misc_feature: oligonucleotide substrate
gacugcuagccgaguag

SEQ ID NO: 55 - RNA, 17 nt, artificial sequence
  misc_feature: oligonucleotide substrate
cuagccgaguaguguug

SEQ ID NO: 56 - RNA, 17 nt, artificial sequence
  misc_feature: oligonucleotide substrate
gccgaguaguguugggu

SEQ ID NO: 57 - RNA, 17 nt, artificial sequence
  misc_feature: oligonucleotide substrate
cgaguaguguugggucg

SEQ ID NO: 58 - RNA, 17 nt, artificial sequence
  misc_feature: oligonucleotide substrate
aguguugggucgcgaaa

SEQ ID NO: 59 - RNA, 17 nt, artificial sequence
  misc_feature: oligonucleotide substrate
guugggucgcgaaaggc

SEQ ID NO: 60 - RNA, 17 nt, artificial sequence
  misc_feature: oligonucleotide substrate
cgcgaaaggccuugugg

SEQ ID NO: 61 - RNA, 17 nt, artificial sequence
  misc_feature: oligonucleotide substrate
aaggccuugugguacug

SEQ ID NO: 62 - RNA, 17 nt, artificial sequence
  misc_feature: oligonucleotide substrate
gccuugugguacugccu

SEQ ID NO: 63 - RNA, 17 nt, artificial sequence
  misc_feature: oligonucleotide substrate
cuugugguacugccuga

SEQ ID NO: 64 - RNA, 17 nt, artificial sequence
  misc_feature: oligonucleotide substrate
gugguacugccugauag

SEQ ID NO: 65 - RNA, 17 nt, artificial sequence
  misc_feature: oligonucleotide substrate
acugccugauagggugc

SEQ ID NO: 66 - RNA, 17 nt, artificial sequence
  misc_feature: oligonucleotide substrate
cugauagggugcuugcg

SEQ ID NO: 67 - RNA, 17 nt, artificial sequence
  misc_feature: oligonucleotide substrate
gauagggugcuugcgag

SEQ ID NO: 68 - RNA, 17 nt, artificial sequence
  misc_feature: oligonucleotide substrate
gggugcuugcgagugcc

SEQ ID NO: 69 - RNA, 17 nt, artificial sequence
  misc_feature: oligonucleotide substrate
gcuugcgagugccccgg

SEQ ID NO: 70 - RNA, 17 nt, artificial sequence
  misc_feature: oligonucleotide substrate
uugcgagugccccggga

SEQ ID NO: 71 - RNA, 17 nt, artificial sequence
  misc_feature: oligonucleotide substrate
cccgggaggucucguag

SEQ ID NO: 72 - RNA, 17 nt, artificial sequence
  misc_feature: oligonucleotide substrate
gaggucucguagaccgu

SEQ ID NO: 73 - RNA, 17 nt, artificial sequence
  misc_feature: oligonucleotide substrate
ucucguagaccgugcac

SEQ ID NO: 74 - RNA, 17 nt, artificial sequence
  misc_feature: oligonucleotide substrate
cguagaccgugcaccau

SEQ ID NO: 75 - RNA, 17 nt, artificial sequence
  misc_feature: oligonucleotide substrate
uagaccgugcaccauga

SEQ ID NO: 76 - RNA, 17 nt, artificial sequence
  misc_feature: oligonucleotide substrate
gaccgugcaccaugagc

SEQ ID NO: 77 - RNA, 17 nt, artificial sequence
  misc_feature: oligonucleotide substrate
cgugcaccaugagcacg

SEQ ID NO: 78 - RNA, 17 nt, artificial sequence
  misc_feature: oligonucleotide substrate
caccaugagcacgaauc

SEQ ID NO: 79 - RNA, 17 nt, artificial sequence
  misc_feature: oligonucleotide substrate
ccaugagcacgaauccu

SEQ ID NO: 80 - RNA, 17 nt, artificial sequence
  misc_feature: oligonucleotide substrate
gagcacgaauccuaaac

SEQ ID NO: 81 - RNA, 17 nt, artificial sequence
  misc_feature: oligonucleotide substrate
aauccuaaaccucaaag

SEQ ID NO: 82 - RNA, 17 nt, artificial sequence
  misc_feature: oligonucleotide substrate
aaagaaaaaccaaacgu

SEQ ID NO: 83 - RNA, 17 nt, artificial sequence
  misc_feature: oligonucleotide substrate
aaaaccaaacguaacac

SEQ ID NO: 84 - RNA, 17 nt, artificial sequence
  misc_feature: oligonucleotide substrate
aaccaaacguaacacca

SEQ ID NO: 85 - RNA, 17 nt, artificial sequence
  misc_feature: oligonucleotide substrate
caaacguaacaccaacc

SEQ ID NO: 86 - RNA, 17 nt, artificial sequence
  misc_feature: oligonucleotide substrate
aacguaacaccaaccgc

SEQ ID NO: 87 - RNA, 17 nt, artificial sequence
  misc_feature: oligonucleotide substrate
uaacaccaaccgccgcc

SEQ ID NO: 88 - RNA, 17 nt, artificial sequence
  misc_feature: oligonucleotide substrate
caccaaccgccgcccac

SEQ ID NO: 89 - RNA, 17 nt, artificial sequence
  misc_feature: oligonucleotide substrate
caaccgccgcccacagg

SEQ ID NO: 90 - RNA, 17 nt, artificial sequence
  misc_feature: oligonucleotide substrate
cgccgcccacaggacgu

SEQ ID NO: 91 - RNA, 17 nt, artificial sequence
  misc_feature: oligonucleotide substrate
cccacaggacgucaagu

SEQ ID NO: 92 - RNA, 17 nt, artificial sequence
  misc_feature: oligonucleotide substrate
cacaggacgucaaguuc

SEQ ID NO: 93 - RNA, 17 nt, artificial sequence
  misc_feature: oligonucleotide substrate
gacgucaaguucccggg

SEQ ID NO: 94 - RNA, 17 nt, artificial sequence
  misc_feature: oligonucleotide substrate
guucccgggcggugguc

SEQ ID NO: 95 - RNA, 17 nt, artificial sequence
  misc_feature: oligonucleotide substrate
cccgggcgguggucaga

SEQ ID NO: 96 - RNA, 17 nt, artificial sequence
  misc_feature: oligonucleotide substrate
gggcgguggucagaucg

SEQ ID NO: 97 - RNA, 17 nt, artificial sequence
  misc_feature: oligonucleotide substrate
guggucagaucguuggu

SEQ ID NO: 98 - RNA, 17 nt, artificial sequence
  misc_feature: oligonucleotide substrate
gucagaucguuggugga

SEQ ID NO: 99 - RNA, 17 nt, artificial sequence
  misc_feature: oligonucleotide substrate
gaucguugguggaguuu

SEQ ID NO: 100 - RNA, 17 nt, artificial sequence
  misc_feature: oligonucleotide substrate
uugguggaguuuaccug

SEQ ID NO: 101 - RNA, 17 nt, artificial sequence
  misc_feature: oligonucleotide substrate
uggaguuuaccuguugc

SEQ ID NO: 102 - RNA, 17 nt, artificial sequence
  misc_feature: oligonucleotide substrate
guuuaccuguugccgcg

SEQ ID NO: 103 - RNA, 17 nt, artificial sequence
  misc_feature: oligonucleotide substrate
uaccuguugccgcgcag

SEQ ID NO: 104 - RNA, 17 nt, artificial sequence
  misc_feature: oligonucleotide substrate
cuguugccgcgcagggg

SEQ ID NO: 105 - RNA, 17 nt, artificial sequence
  misc_feature: oligonucleotide substrate
guugccgcgcaggggcc

SEQ ID NO: 106 - RNA, 17 nt, artificial sequence
  misc_feature: oligonucleotide substrate
gcgcaggggccccaggu

SEQ ID NO: 107 - RNA, 17 nt, artificial sequence
  misc_feature: oligonucleotide substrate
ggccccagguugggugu

SEQ ID NO: 108 - RNA, 17 nt, artificial sequence
  misc_feature: oligonucleotide substrate
cagguugggugugcgcg

SEQ ID NO: 109 - RNA, 17 nt, artificial sequence
  misc_feature: oligonucleotide substrate
gguugggugugcgcgcg

SEQ ID NO: 110 - RNA, 17 nt, artificial sequence
  misc_feature: oligonucleotide substrate
uugggugugcgcgcgac

SEQ ID NO: 111 - RNA, 17 nt, artificial sequence
  misc_feature: oligonucleotide substrate
gggugugcgcgcgacua

SEQ ID NO: 112 - RNA, 17 nt, artificial sequence
  misc_feature: oligonucleotide substrate
gugugcgcgcgacuagg

SEQ ID NO: 113 - RNA, 17 nt, artificial sequence
  misc_feature: oligonucleotide substrate
ugcgcgcgacuaggaag

SEQ ID NO: 114 - RNA, 17 nt, artificial sequence
  misc_feature: oligonucleotide substrate
cuaggaagacuuccgag

SEQ ID NO: 115 - RNA, 17 nt, artificial sequence
  misc_feature: oligonucleotide substrate
acuuccgagcggucgca

SEQ ID NO: 116 - RNA, 17 nt, artificial sequence
  misc_feature: oligonucleotide substrate
uccgagcggucgcaacc

SEQ ID NO: 117 - RNA, 17 nt, artificial sequence
  misc_feature: oligonucleotide substrate
gagcggucgcaaccucg

SEQ ID NO: 118 - RNA, 17 nt, artificial sequence
  misc_feature: oligonucleotide substrate
cggucgcaaccucgugg

SEQ ID NO: 119 - RNA, 17 nt, artificial sequence
  misc_feature: oligonucleotide substrate
gcaaccucguggaaggc

SEQ ID NO: 120 - RNA, 17 nt, artificial sequence
  misc_feature: oligonucleotide substrate
cguggaaggcgacaacc

SEQ ID NO: 121 - RNA, 17 nt, artificial sequence
  misc_feature: oligonucleotide substrate
ggaaggcgacaaccuau

SEQ ID NO: 122 - RNA, 17 nt, artificial sequence
  misc_feature: oligonucleotide substrate
aggcgacaaccuauccc

SEQ ID NO: 123 - RNA, 17 nt, artificial sequence
  misc_feature: oligonucleotide substrate
gacaaccuauccccaag

SEQ ID NO: 124 - RNA, 17 nt, artificial sequence
  misc_feature: oligonucleotide substrate
uccccaaggcucgccgg

SEQ ID NO: 125 - RNA, 17 nt, artificial sequence
  misc_feature: oligonucleotide substrate
caaggcucgccggcccg

SEQ ID NO: 126 - RNA, 17 nt, artificial sequence
  misc_feature: oligonucleotide substrate
gcucgccggcccgaggg

SEQ ID NO: 127 - RNA, 17 nt, artificial sequence
  misc_feature: oligonucleotide substrate
gcccgagggcagggccu

SEQ ID NO: 128 - RNA, 17 nt, artificial sequence
  misc_feature: oligonucleotide substrate
agggcagggccugggcu

SEQ ID NO: 129 - RNA, 17 nt, artificial sequence
  misc_feature: oligonucleotide substrate
gggccugggcucagccc

SEQ ID NO: 130 - RNA, 17 nt, artificial sequence
  misc_feature: oligonucleotide substrate
ugggcucagcccgggua

SEQ ID NO: 131 - RNA, 17 nt, artificial sequence
  misc_feature: oligonucleotide substrate
cagcccggguacccuug

SEQ ID NO: 132 - RNA, 17 nt, artificial sequence
  misc_feature: oligonucleotide substrate
gcccggguacccuuggc

SEQ ID NO: 133 - RNA, 17 nt, artificial sequence
  misc_feature: oligonucleotide substrate
uacccuuggccccucua

SEQ ID NO: 134 - RNA, 17 nt, artificial sequence
  misc_feature: oligonucleotide substrate
gccccucuauggcaaug

SEQ ID NO: 135 - RNA, 17 nt, artificial sequence
  misc_feature: oligonucleotide substrate
ccucuauggcaaugagg

SEQ ID NO: 136 - RNA, 17 nt, artificial sequence
  misc_feature: oligonucleotide substrate
cuauggcaaugagggcu

SEQ ID NO: 137 - RNA, 17 nt, artificial sequence
  misc_feature: oligonucleotide substrate
caaugagggcuuagggu

SEQ ID NO: 138 - RNA, 17 nt, artificial sequence
  misc_feature: oligonucleotide substrate
ggcuuagggugggcagg

SEQ ID NO: 139 - RNA, 17 nt, artificial sequence
  misc_feature: oligonucleotide substrate
uagggugggcaggaugg

SEQ ID NO: 140 - RNA, 17 nt, artificial sequence
  misc_feature: oligonucleotide substrate
ugggcaggauggcuccu

SEQ ID NO: 141 - RNA, 17 nt, artificial sequence
  misc_feature: oligonucleotide substrate
gcaggauggcuccuguc

SEQ ID NO: 142 - RNA, 17 nt, artificial sequence
  misc_feature: oligonucleotide substrate
uggcuccugucaccccg

SEQ ID NO: 143 - RNA, 17 nt, artificial sequence
  misc_feature: oligonucleotide substrate
cuccugucaccccgcgg

SEQ ID NO: 144 - RNA, 17 nt, artificial sequence
  misc_feature: oligonucleotide substrate
gucaccccgcggcuccc

SEQ ID NO: 145 - RNA, 17 nt, artificial sequence
  misc_feature: oligonucleotide substrate
accccgcggcucccggc

SEQ ID NO: 146 - RNA, 17 nt, artificial sequence
  misc_feature: oligonucleotide substrate
ggcucccggccuaguug

SEQ ID NO: 147 - RNA, 17 nt, artificial sequence
  misc_feature: oligonucleotide substrate
ccggccuaguuggggcc

SEQ ID NO: 148 - RNA, 17 nt, artificial sequence
  misc_feature: oligonucleotide substrate
uaguuggggccccacgg

SEQ ID NO: 149 - RNA, 17 nt, artificial sequence
  misc_feature: oligonucleotide substrate
ggggccccacggacccc

SEQ ID NO: 150 - RNA, 17 nt, artificial sequence
  misc_feature: oligonucleotide substrate
ccccacggacccccggc

SEQ ID NO: 151 - RNA, 17 nt, artificial sequence
  misc_feature: oligonucleotide substrate
gacccccggcguagguc

SEQ ID NO: 152 - RNA, 17 nt, artificial sequence
  misc_feature: oligonucleotide substrate
cccccggcguaggucgc

SEQ ID NO: 153 - RNA, 17 nt, artificial sequence
  misc_feature: oligonucleotide substrate
cggcguaggucgcguaa

SEQ ID NO: 154 - RNA, 17 nt, artificial sequence
  misc_feature: oligonucleotide substrate
cguaggucgcguaacuu

SEQ ID NO: 155 - RNA, 17 nt, artificial sequence
  misc_feature: oligonucleotide substrate
uaggucgcguaacuugg

SEQ ID NO: 156 - RNA, 17 nt, artificial sequence
  misc_feature: oligonucleotide substrate
gucgcguaacuugggua

SEQ ID NO: 157 - RNA, 17 nt, artificial sequence
  misc_feature: oligonucleotide substrate
uaacuuggguaagguca

SEQ ID NO: 158 - RNA, 17 nt, artificial sequence
  misc_feature: oligonucleotide substrate
uggguaaggucaucgau

SEQ ID NO: 159 - RNA, 17 nt, artificial sequence
  misc_feature: oligonucleotide substrate
guaaggucaucgauacc

SEQ ID NO: 160 - RNA, 17 nt, artificial sequence
  misc_feature: oligonucleotide substrate
ggucaucgauacccuca

SEQ ID NO: 161 - RNA, 17 nt, artificial sequence
  misc_feature: oligonucleotide substrate
ucaucgauacccucaca

SEQ ID NO: 162 - RNA, 17 nt, artificial sequence
  misc_feature: oligonucleotide substrate
auacccucacaugcggc

SEQ ID NO: 163 - RNA, 17 nt, artificial sequence
  misc_feature: oligonucleotide substrate
acccucacaugcggcuu

SEQ ID NO: 164 - RNA, 17 nt, artificial sequence
  misc_feature: oligonucleotide substrate
ccucacaugcggcuucg

SEQ ID NO: 165 - RNA, 17 nt, artificial sequence
  misc_feature: oligonucleotide substrate
cacaugcggcuucgccg

SEQ ID NO: 166 - RNA, 17 nt, artificial sequence
  misc_feature: oligonucleotide substrate
gcggcuucgccgaccuc

SEQ ID NO: 167 - RNA, 17 nt, artificial sequence
  misc_feature: oligonucleotide substrate
cuucgccgaccucaugg

SEQ ID NO: 168 - RNA, 17 nt, artificial sequence
  misc_feature: oligonucleotide substrate
ccgaccucaugggguac

SEQ ID NO: 169 - RNA, 17 nt, artificial sequence
  misc_feature: oligonucleotide substrate
cucaugggguacauucc

SEQ ID NO: 170 - RNA, 17 nt, artificial sequence
  misc_feature: oligonucleotide substrate
caugggguacauuccgc

SEQ ID NO: 171 - RNA, 17 nt, artificial sequence
  misc_feature: oligonucleotide substrate
ugggguacauuccgcuc

SEQ ID NO: 172 - RNA, 17 nt, artificial sequence
  misc_feature: oligonucleotide substrate
uacauuccgcucgucgg

SEQ ID NO: 173 - RNA, 17 nt, artificial sequence
  misc_feature: oligonucleotide substrate
uuccgcucgucggcgcc

SEQ ID NO: 174 - RNA, 17 nt, artificial sequence
  misc_feature: oligonucleotide substrate
gcucgucggcgcccccu

SEQ ID NO: 175 - RNA, 17 nt, artificial sequence
  misc_feature: oligonucleotide substrate
ucgucggcgcccccuug

SEQ ID NO: 176 - RNA, 17 nt, artificial sequence
  misc_feature: oligonucleotide substrate
cuugggaggcacugcca

SEQ ID NO: 177 - RNA, 17 nt, artificial sequence
  misc_feature: oligonucleotide substrate
ugggaggcacugccagg

SEQ ID NO: 178 - RNA, 17 nt, artificial sequence
  misc_feature: oligonucleotide substrate
gaggcacugccagggcc

SEQ ID NO: 179 - RNA, 17 nt, artificial sequence
  misc_feature: oligonucleotide substrate
cugccagggcccuggcg

SEQ ID NO: 180 - RNA, 17 nt, artificial sequence
  misc_feature: oligonucleotide substrate
gggcccuggcgcauggc

SEQ ID NO: 181 - RNA, 17 nt, artificial sequence
  misc_feature: oligonucleotide substrate
gcccuggcgcauggcgu

SEQ ID NO: 182 - RNA, 17 nt, artificial sequence
  misc_feature: oligonucleotide substrate
ccuggcgcauggcgucc

SEQ ID NO: 183 - RNA, 17 nt, artificial sequence
  misc_feature: oligonucleotide substrate
ggcgcauggcguccggg

SEQ ID NO: 184 - RNA, 17 nt, artificial sequence
  misc_feature: oligonucleotide substrate
cgcauggcguccggguu

SEQ ID NO: 185 - RNA, 17 nt, artificial sequence
  misc_feature: oligonucleotide substrate
gcguccggguucuggaa

SEQ ID NO: 186 - RNA, 17 nt, artificial sequence
  misc_feature: oligonucleotide substrate
ucuggaagacggcguga

SEQ ID NO: 187 - RNA, 17 nt, artificial sequence
  misc_feature: oligonucleotide substrate
ggaagacggcgugaacu

SEQ ID NO: 188 - RNA, 17 nt, artificial sequence
  misc_feature: oligonucleotide substrate
aagacggcgugaacuau

SEQ ID NO: 189 - RNA, 17 nt, artificial sequence
  misc_feature: oligonucleotide substrate
cggcgugaacuaugcaa

SEQ ID NO: 190 - RNA, 17 nt, artificial sequence
  misc_feature: oligonucleotide substrate
cgugaacuaugcaacag

SEQ ID NO: 191 - RNA, 17 nt, artificial sequence
  misc_feature: oligonucleotide substrate
ugaacuaugcaacaggg

SEQ ID NO: 192 - RNA, 17 nt, artificial sequence
  misc_feature: oligonucleotide substrate
acuaugcaacagggaau

SEQ ID NO: 193 - RNA, 17 nt, artificial sequence
  misc_feature: oligonucleotide substrate
aacagggaaucugcccg

SEQ ID NO: 194 - RNA, 17 nt, artificial sequence
  misc_feature: oligonucleotide substrate
gggaaucugcccgguug

SEQ ID NO: 195 - RNA, 17 nt, artificial sequence
  misc_feature: oligonucleotide substrate
ucugcccgguugcucuu

SEQ ID NO: 196 - RNA, 17 nt, artificial sequence
  misc_feature: oligonucleotide substrate
gcccgguugcucuuucu

SEQ ID NO: 197 - RNA, 17 nt, artificial sequence
  misc_feature: oligonucleotide substrate
cuuucucuaucuuccuc

SEQ ID NO: 198 - RNA, 17 nt, artificial sequence
  misc_feature: oligonucleotide substrate
uccucuuggcucugcug

SEQ ID NO: 199 - RNA, 17 nt, artificial sequence
  misc_feature: oligonucleotide substrate
uuggcucugcugcccug

SEQ ID NO: 200 - RNA, 17 nt, artificial sequence
  misc_feature: oligonucleotide substrate
gcucugcugcccugucu

SEQ ID NO: 201 - RNA, 17 nt, artificial sequence
  misc_feature: oligonucleotide substrate
gcugcccugucugacca

SEQ ID NO: 202 - RNA, 17 nt, artificial sequence
  misc_feature: oligonucleotide substrate
ccugucugaccauccca

SEQ ID NO: 203 - RNA, 17 nt, artificial sequence
  misc_feature: oligonucleotide substrate
gucugaccaucccagcc

SEQ ID NO: 204 - RNA, 17 nt, artificial sequence
  misc_feature: oligonucleotide substrate
ccaucccagccuccgcu

SEQ ID NO: 205 - RNA, 17 nt, artificial sequence
  misc_feature: oligonucleotide substrate
cagccuccgcuuaugag

SEQ ID NO: 206 - RNA, 17 nt, artificial sequence
  misc_feature: oligonucleotide substrate
cuccgcuuaugaggugu

SEQ ID NO: 207 - RNA, 17 nt, artificial sequence
  misc_feature: oligonucleotide substrate
cuuaugaggugugcaac

SEQ ID NO: 208 - RNA, 17 nt, artificial sequence
  misc_feature: oligonucleotide substrate
uaugaggugugcaacgc

SEQ ID NO: 209 - RNA, 17 nt, artificial sequence
  misc_feature: oligonucleotide substrate
ugaggugugcaacgcgu

SEQ ID NO: 210 - RNA, 17 nt, artificial sequence
  misc_feature: oligonucleotide substrate
ggugugcaacgcguccg

SEQ ID NO: 211 - RNA, 17 nt, artificial sequence
  misc_feature: oligonucleotide substrate
ugugcaacgcguccggg

SEQ ID NO: 212 - RNA, 17 nt, artificial sequence
  misc_feature: oligonucleotide substrate
ugcaacgcguccgggcu

SEQ ID NO: 213 - RNA, 17 nt, artificial sequence
  misc_feature: oligonucleotide substrate
gcguccgggcuguacca

SEQ ID NO: 214 - RNA, 17 nt, artificial sequence
  misc_feature: oligonucleotide substrate
uccgggcuguaccaugu

SEQ ID NO: 215 - RNA, 17 nt, artificial sequence
  misc_feature: oligonucleotide substrate
cgggcuguaccauguca

SEQ ID NO: 216 - RNA, 17 nt, artificial sequence
  misc_feature: oligonucleotide substrate
gcuguaccaugucacga

SEQ ID NO: 217 - RNA, 17 nt, artificial sequence
  misc_feature: oligonucleotide substrate
uguaccaugucacgaac

SEQ ID NO: 218 - RNA, 17 nt, artificial sequence
  misc_feature: oligonucleotide substrate
accaugucacgaacgau

SEQ ID NO: 219 - RNA, 17 nt, artificial sequence
  misc_feature: oligonucleotide substrate
ugucacgaacgauugcu

SEQ ID NO: 220 - RNA, 17 nt, artificial sequence
  misc_feature: oligonucleotide substrate
cacgaacgauugcucca

SEQ ID NO: 221 - RNA, 17 nt, artificial sequence
  misc_feature: oligonucleotide substrate
gaacgauugcuccaacu

SEQ ID NO: 222 - RNA, 17 nt, artificial sequence
  misc_feature: oligonucleotide substrate
uugcuccaacucaagca

SEQ ID NO: 223 - RNA, 17 nt, artificial sequence
  misc_feature: oligonucleotide substrate
caacucaagcauugugu

SEQ ID NO: 224 - RNA, 17 nt, artificial sequence
  misc_feature: oligonucleotide substrate
acucaagcauuguguau

SEQ ID NO: 225 - RNA, 17 nt, artificial sequence
  misc_feature: oligonucleotide substrate
caagcauuguguaugag

SEQ ID NO: 226 - RNA, 17 nt, artificial sequence
  misc_feature: oligonucleotide substrate
agcauuguguaugaggc

SEQ ID NO: 227 - RNA, 17 nt, artificial sequence
  misc_feature: oligonucleotide substrate
cauuguguaugaggcag

SEQ ID NO: 228 - RNA, 17 nt, artificial sequence
  misc_feature: oligonucleotide substrate
uguaugaggcagaggac

SEQ ID NO: 229 - RNA, 17 nt, artificial sequence
  misc_feature: oligonucleotide substrate
ggcagaggacaugauca

SEQ ID NO: 230 - RNA, 17 nt, artificial sequence
  misc_feature: oligonucleotide substrate
cagaggacaugaucaug

SEQ ID NO: 231 - RNA, 17 nt, artificial sequence
  misc_feature: oligonucleotide substrate
aggacaugaucaugcac

SEQ ID NO: 232 - RNA, 17 nt, artificial sequence
  misc_feature: oligonucleotide substrate
acaugaucaugcacacc

SEQ ID NO: 233 - RNA, 17 nt, artificial sequence
  misc_feature: oligonucleotide substrate
augaucaugcacacccc

SEQ ID NO: 234 - RNA, 17 nt, artificial sequence
  misc_feature: oligonucleotide substrate
gaucaugcacaccccgg

SEQ ID NO: 235 - RNA, 17 nt, artificial sequence
  misc_feature: oligonucleotide substrate
ucaugcacaccccgggg

SEQ ID NO: 236 - RNA, 17 nt, artificial sequence
  misc_feature: oligonucleotide substrate
accccggggugcgugcc

SEQ ID NO: 237 - RNA, 17 nt, artificial sequence
  misc_feature: oligonucleotide substrate
cccggggugcgugcccu

SEQ ID NO: 238 - RNA, 17 nt, artificial sequence
  misc_feature: oligonucleotide substrate
cggggugcgugcccugc

SEQ ID NO: 239 - RNA, 17 nt, artificial sequence
  misc_feature: oligonucleotide substrate
gggugcgugcccugcgu

SEQ ID NO: 240 - RNA, 17 nt, artificial sequence
  misc_feature: oligonucleotide substrate
cgugcccugcguucggg

SEQ ID NO: 241 - RNA, 17 nt, artificial sequence
  misc_feature: oligonucleotide substrate
ugcccugcguucgggag

SEQ ID NO: 242 - RNA, 17 nt, artificial sequence
  misc_feature: oligonucleotide substrate
ucgggagaacaacuccu

SEQ ID NO: 243 - RNA, 17 nt, artificial sequence
  misc_feature: oligonucleotide substrate
ggagaacaacuccuccc

SEQ ID NO: 244 - RNA, 17 nt, artificial sequence
  misc_feature: oligonucleotide substrate
cuccucccgcugcuggg

SEQ ID NO: 245 - RNA, 17 nt, artificial sequence
  misc_feature: oligonucleotide substrate
cucccgcugcuggguag

SEQ ID NO: 246 - RNA, 17 nt, artificial sequence
  misc_feature: oligonucleotide substrate
gcugcuggguagcgcuc

SEQ ID NO: 247 - RNA, 17 nt, artificial sequence
  misc_feature: oligonucleotide substrate
gcuggguagcgcucacu

SEQ ID NO: 248 - RNA, 17 nt, artificial sequence
  misc_feature: oligonucleotide substrate
uggguagcgcucacucc

SEQ ID NO: 249 - RNA, 17 nt, artificial sequence
  misc_feature: oligonucleotide substrate
uagcgcucacucccacg

SEQ ID NO: 250 - RNA, 17 nt, artificial sequence
  misc_feature: oligonucleotide substrate
ucacucccacgcucgcg

SEQ ID NO: 251 - RNA, 17 nt, artificial sequence
  misc_feature: oligonucleotide substrate
acucccacgcucgcggc

SEQ ID NO: 252 - RNA, 17 nt, artificial sequence
  misc_feature: oligonucleotide substrate
ccacgcucgcggccagg

SEQ ID NO: 253 - RNA, 17 nt, artificial sequence
  misc_feature: oligonucleotide substrate
cgcucgcggccaggaau

SEQ ID NO: 254 - RNA, 17 nt, artificial sequence
  misc_feature: oligonucleotide substrate
ggccaggaaugccagca

SEQ ID NO: 255 - RNA, 17 nt, artificial sequence
  misc_feature: oligonucleotide substrate
ccaggaaugccagcauc

SEQ ID NO: 256 - RNA, 17 nt, artificial sequence
  misc_feature: oligonucleotide substrate
gaaugccagcaucccca

SEQ ID NO: 257 - RNA, 17 nt, artificial sequence
  misc_feature: oligonucleotide substrate
augccagcauccccacu

SEQ ID NO: 258 - RNA, 17 nt, artificial sequence
  misc_feature: oligonucleotide substrate
gcauccccacuacgacg

SEQ ID NO: 259 - RNA, 17 nt, artificial sequence
  misc_feature: oligonucleotide substrate
uccccacuacgacgaua

SEQ ID NO: 260 - RNA, 17 nt, artificial sequence
  misc_feature: oligonucleotide substrate
ccacuacgacgauacgg

SEQ ID NO: 261 - RNA, 17 nt, artificial sequence
  misc_feature: oligonucleotide substrate
cuacgacgauacggcgu

SEQ ID NO: 262 - RNA, 17 nt, artificial sequence
  misc_feature: oligonucleotide substrate
acgacgauacggcguca

SEQ ID NO: 263 - RNA, 17 nt, artificial sequence
  misc_feature: oligonucleotide substrate
acgauacggcgucacgu

SEQ ID NO: 264 - RNA, 17 nt, artificial sequence
  misc_feature: oligonucleotide substrate
gauacggcgucacgucg

SEQ ID NO: 265 - RNA, 17 nt, artificial sequence
  misc_feature: oligonucleotide substrate
acggcgucacgucgauu

SEQ ID NO: 266 - RNA, 17 nt, artificial sequence
  misc_feature: oligonucleotide substrate
ggcgucacgucgauuug

SEQ ID NO: 267 - RNA, 17 nt, artificial sequence
  misc_feature: oligonucleotide substrate
ucacgucgauuugcucg

SEQ ID NO: 268 - RNA, 17 nt, artificial sequence
  misc_feature: oligonucleotide substrate
gucgauuugcucguugg

SEQ ID NO: 269 - RNA, 17 nt, artificial sequence
  misc_feature: oligonucleotide substrate
auuugcucguuggggcg

SEQ ID NO: 270 - RNA, 17 nt, artificial sequence
  misc_feature: oligonucleotide substrate
ucguuggggcggcugcu

SEQ ID NO: 271 - RNA, 17 nt, artificial sequence
  misc_feature: oligonucleotide substrate
uuggggcggcugcuuuc

SEQ ID NO: 272 - RNA, 17 nt, artificial sequence
  misc_feature: oligonucleotide substrate
gggcggcugcuuucugc

SEQ ID NO: 273 - RNA, 17 nt, artificial sequence
  misc_feature: oligonucleotide substrate
ugcuuucugcucugcua

SEQ ID NO: 274 - RNA, 17 nt, artificial sequence
  misc_feature: oligonucleotide substrate
ucugcucugcuauguac

SEQ ID NO: 275 - RNA, 17 nt, artificial sequence
  misc_feature: oligonucleotide substrate
gcucugcuauguacgug

SEQ ID NO: 276 - RNA, 17 nt, artificial sequence
  misc_feature: oligonucleotide substrate
ucugcuauguacguggg

SEQ ID NO: 277 - RNA, 17 nt, artificial sequence
  misc_feature: oligonucleotide substrate
ugcuauguacguggggg

SEQ ID NO: 278 - RNA, 17 nt, artificial sequence
  misc_feature: oligonucleotide substrate
cuauguacgugggggau

SEQ ID NO: 279 - RNA, 17 nt, artificial sequence
  misc_feature: oligonucleotide substrate
cgugggggaucucugcg

SEQ ID NO: 280 - RNA, 17 nt, artificial sequence
  misc_feature: oligonucleotide substrate
ggaucucugcggaucug

SEQ ID NO: 281 - RNA, 17 nt, artificial sequence
  misc_feature: oligonucleotide substrate
cucugcggaucugucuu

SEQ ID NO: 282 - RNA, 17 nt, artificial sequence
  misc_feature: oligonucleotide substrate
gcggaucugucuuccuc

SEQ ID NO: 283 - RNA, 17 nt, artificial sequence
  misc_feature: oligonucleotide substrate
ucuuccucgucucucag

SEQ ID NO: 284 - RNA, 17 nt, artificial sequence
  misc_feature: oligonucleotide substrate
gucucucagcuguucac

SEQ ID NO: 285 - RNA, 17 nt, artificial sequence
  misc_feature: oligonucleotide substrate
ucucagcuguucaccuu

SEQ ID NO: 286 - RNA, 17 nt, artificial sequence
  misc_feature: oligonucleotide substrate
agcuguucaccuucucg

SEQ ID NO: 287 - RNA, 17 nt, artificial sequence
  misc_feature: oligonucleotide substrate
accuucucgccucgccg

SEQ ID NO: 288 - RNA, 17 nt, artificial sequence
  misc_feature: oligonucleotide substrate
cucgccucgccgguaug

SEQ ID NO: 289 - RNA, 17 nt, artificial sequence
  misc_feature: oligonucleotide substrate
ccucgccgguaugagac

SEQ ID NO: 290 - RNA, 17 nt, artificial sequence
  misc_feature: oligonucleotide substrate
ucgccgguaugagacag

SEQ ID NO: 291 - RNA, 17 nt, artificial sequence
  misc_feature: oligonucleotide substrate
gguaugagacaguacag

SEQ ID NO: 292 - RNA, 17 nt, artificial sequence
  misc_feature: oligonucleotide substrate
augagacaguacaggac

SEQ ID NO: 293 - RNA, 17 nt, artificial sequence
  misc_feature: oligonucleotide substrate
gagacaguacaggacug

SEQ ID NO: 294 - RNA, 17 nt, artificial sequence
  misc_feature: oligonucleotide substrate
aguacaggacuguaauu

SEQ ID NO: 295 - RNA, 17 nt, artificial sequence
  misc_feature: oligonucleotide substrate
acaggacuguaauugcu

SEQ ID NO: 296 - RNA, 17 nt, artificial sequence
  misc_feature: oligonucleotide substrate
ggacuguaauugcucga

SEQ ID NO: 297 - RNA, 17 nt, artificial sequence
  misc_feature: oligonucleotide substrate
cuguaauugcucgaucu

SEQ ID NO: 298 - RNA, 17 nt, artificial sequence
  misc_feature: oligonucleotide substrate
auugcucgaucuauccc

SEQ ID NO: 299 - RNA, 17 nt, artificial sequence
  misc_feature: oligonucleotide substrate
cucgaucuaucccggcc

SEQ ID NO: 300 - RNA, 17 nt, artificial sequence
  misc_feature: oligonucleotide substrate
cuaucccggccacguau

SEQ ID NO: 301 - RNA, 17 nt, artificial sequence
  misc_feature: oligonucleotide substrate
ucccggccacguaucag

SEQ ID NO: 302 - RNA, 17 nt, artificial sequence
  misc_feature: oligonucleotide substrate
ccggccacguaucaggc

SEQ ID NO: 303 - RNA, 17 nt, artificial sequence
  misc_feature: oligonucleotide substrate
ggccacguaucaggcca

SEQ ID NO: 304 - RNA, 17 nt, artificial sequence
  misc_feature: oligonucleotide substrate
cguaucaggccaucgca

SEQ ID NO: 305 - RNA, 17 nt, artificial sequence
  misc_feature: oligonucleotide substrate
aucaggccaucgcaugg

SEQ ID NO: 306 - RNA, 17 nt, artificial sequence
  misc_feature: oligonucleotide substrate
aggccaucgcauggcuu

SEQ ID NO: 307 - RNA, 17 nt, artificial sequence
  misc_feature: oligonucleotide substrate
gccaucgcauggcuugg

SEQ ID NO: 308 - RNA, 17 nt, artificial sequence
  misc_feature: oligonucleotide substrate
aucgcauggcuugggau

SEQ ID NO: 309 - RNA, 17 nt, artificial sequence
  misc_feature: oligonucleotide substrate
ggcuugggauaugauga

SEQ ID NO: 310 - RNA, 17 nt, artificial sequence
  misc_feature: oligonucleotide substrate
cuugggauaugaugaug

SEQ ID NO: 311 - RNA, 17 nt, artificial sequence
  misc_feature: oligonucleotide substrate
gggauaugaugaugaau

SEQ ID NO: 312 - RNA, 17 nt, artificial sequence
  misc_feature: oligonucleotide substrate
auaugaugaugaauugg

SEQ ID NO: 313 - RNA, 17 nt, artificial sequence
  misc_feature: oligonucleotide substrate
gaugaugaauuggucac

SEQ ID NO: 314 - RNA, 17 nt, artificial sequence
  misc_feature: oligonucleotide substrate
augaauuggucaccuac

SEQ ID NO: 315 - RNA, 17 nt, artificial sequence
  misc_feature: oligonucleotide substrate
aauuggucaccuacaac

SEQ ID NO: 316 - RNA, 17 nt, artificial sequence
  misc_feature: oligonucleotide substrate
ggucaccuacaacagcc

SEQ ID NO: 317 - RNA, 17 nt, artificial sequence
  misc_feature: oligonucleotide substrate
caccuacaacagcccua

SEQ ID NO: 318 - RNA, 17 nt, artificial sequence
  misc_feature: oligonucleotide substrate
cuacaacagcccuagug

SEQ ID NO: 319 - RNA, 17 nt, artificial sequence
  misc_feature: oligonucleotide substrate
cagcccuagugguaucg

SEQ ID NO: 320 - RNA, 17 nt, artificial sequence
  misc_feature: oligonucleotide substrate
cccuagugguaucgcag

SEQ ID NO: 321 - RNA, 17 nt, artificial sequence
  misc_feature: oligonucleotide substrate
cuagugguaucgcaguu

SEQ ID NO: 322 - RNA, 17 nt, artificial sequence
  misc_feature: oligonucleotide substrate
gugguaucgcaguugcu

SEQ ID NO: 323 - RNA, 17 nt, artificial sequence
  misc_feature: oligonucleotide substrate
guaucgcaguugcuccg

SEQ ID NO: 324 - RNA, 17 nt, artificial sequence
  misc_feature: oligonucleotide substrate
ucgcaguugcuccggau

SEQ ID NO: 325 - RNA, 17 nt, artificial sequence
  misc_feature: oligonucleotide substrate
ugcuccggaucccacaa

SEQ ID NO: 326 - RNA, 17 nt, artificial sequence
  misc_feature: oligonucleotide substrate
cggaucccacaagccgu

SEQ ID NO: 327 - RNA, 17 nt, artificial sequence
  misc_feature: oligonucleotide substrate
ucccacaagccgucgug

SEQ ID NO: 328 - RNA, 17 nt, artificial sequence
  misc_feature: oligonucleotide substrate
cacaagccgucguggac

SEQ ID NO: 329 - RNA, 17 nt, artificial sequence
  misc_feature: oligonucleotide substrate
aagccgucguggacaug

SEQ ID NO: 330 - RNA, 17 nt, artificial sequence
  misc_feature: oligonucleotide substrate
cgucguggacauggugg

SEQ ID NO: 331 - RNA, 17 nt, artificial sequence
  misc_feature: oligonucleotide substrate
ucguggacaugguggcg

SEQ ID NO: 332 - RNA, 17 nt, artificial sequence
  misc_feature: oligonucleotide substrate
uggacaugguggcgggg

SEQ ID NO: 333 - RNA, 17 nt, artificial sequence
  misc_feature: oligonucleotide substrate
acaugguggcgggggcc

SEQ ID NO: 334 - RNA, 17 nt, artificial sequence
  misc_feature: oligonucleotide substrate
uggcgggggcccacugg

SEQ ID NO: 335 - RNA, 17 nt, artificial sequence
  misc_feature: oligonucleotide substrate
gggggcccacuggggag

SEQ ID NO: 336 - RNA, 17 nt, artificial sequence
  misc_feature: oligonucleotide substrate
acuggggaguccuggcg

SEQ ID NO: 337 - RNA, 17 nt, artificial sequence
  misc_feature: oligonucleotide substrate
gaguccuggcgggccuu

SEQ ID NO: 338 - RNA, 17 nt, artificial sequence
  misc_feature: oligonucleotide substrate
ccuggcgggccuugccu

SEQ ID NO: 339 - RNA, 17 nt, artificial sequence
  misc_feature: oligonucleotide substrate
cgggccuugccuauuau

SEQ ID NO: 340 - RNA, 17 nt, artificial sequence
  misc_feature: oligonucleotide substrate
ccuugccuauuauucca

SEQ ID NO: 341 - RNA, 17 nt, artificial sequence
  misc_feature: oligonucleotide substrate
ugccuauuauuccaugg

SEQ ID NO: 342 - RNA, 17 nt, artificial sequence
  misc_feature: oligonucleotide substrate
auuauuccauggugggg

SEQ ID NO: 343 - RNA, 17 nt, artificial sequence
  misc_feature: oligonucleotide substrate
auuccaugguggggaac

SEQ ID NO: 344 - RNA, 17 nt, artificial sequence
  misc_feature: oligonucleotide substrate
gguggggaacugggcua

SEQ ID NO: 345 - RNA, 17 nt, artificial sequence
  misc_feature: oligonucleotide substrate
ggaacugggcuaaggug

SEQ ID NO: 346 - RNA, 17 nt, artificial sequence
  misc_feature: oligonucleotide substrate
gggcuaagguguugauu

SEQ ID NO: 347 - RNA, 17 nt, artificial sequence
  misc_feature: oligonucleotide substrate
gcuaagguguugauugu

SEQ ID NO: 348 - RNA, 17 nt, artificial sequence
  misc_feature: oligonucleotide substrate
agguguugauugugaug

SEQ ID NO: 349 - RNA, 17 nt, artificial sequence
  misc_feature: oligonucleotide substrate
uguugauugugaugcua

SEQ ID NO: 350 - RNA, 17 nt, artificial sequence
  misc_feature: oligonucleotide substrate
ugauugugaugcuacuc

SEQ ID NO: 351 - RNA, 17 nt, artificial sequence
  misc_feature: oligonucleotide substrate
auugugaugcuacucuu

SEQ ID NO: 352 - RNA, 17 nt, artificial sequence
  misc_feature: oligonucleotide substrate
gugaugcuacucuuugc

SEQ ID NO: 353 - RNA, 17 nt, artificial sequence
  misc_feature: oligonucleotide substrate
uacucuuugccggcguu

SEQ ID NO: 354 - RNA, 17 nt, artificial sequence
  misc_feature: oligonucleotide substrate
cuuugccggcguugacg

SEQ ID NO: 355 - RNA, 17 nt, artificial sequence
  misc_feature: oligonucleotide substrate
uugccggcguugacggg

SEQ ID NO: 356 - RNA, 17 nt, artificial sequence
  misc_feature: oligonucleotide substrate
cggcguugacggggaca

SEQ ID NO: 357 - RNA, 17 nt, artificial sequence
  misc_feature: oligonucleotide substrate
ugacggggacaccuaca

SEQ ID NO: 358 - RNA, 17 nt, artificial sequence
  misc_feature: oligonucleotide substrate
acggggacaccuacacg

SEQ ID NO: 359 - RNA, 17 nt, artificial sequence
  misc_feature: oligonucleotide substrate
ggacaccuacacgacag

SEQ ID NO: 360 - RNA, 17 nt, artificial sequence
  misc_feature: oligonucleotide substrate
acaccuacacgacaggg

SEQ ID NO: 361 - RNA, 17 nt, artificial sequence
  misc_feature: oligonucleotide substrate
ccuacacgacagggggg

SEQ ID NO: 362 - RNA, 17 nt, artificial sequence
  misc_feature: oligonucleotide substrate
cagggggggcgcagggc

SEQ ID NO: 363 - RNA, 17 nt, artificial sequence
  misc_feature: oligonucleotide substrate
gggggggcgcagggcca

SEQ ID NO: 364 - RNA, 17 nt, artificial sequence
  misc_feature: oligonucleotide substrate
ggcgcagggccacacca

SEQ ID NO: 365 - RNA, 17 nt, artificial sequence
  misc_feature: oligonucleotide substrate
gcagggccacaccacua

SEQ ID NO: 366 - RNA, 17 nt, artificial sequence
  misc_feature: oligonucleotide substrate
agggccacaccacuagu

SEQ ID NO: 367 - RNA, 17 nt, artificial sequence
  misc_feature: oligonucleotide substrate
gccacaccacuaguagg

SEQ ID NO: 368 - RNA, 17 nt, artificial sequence
  misc_feature: oligonucleotide substrate
caccacuaguagggugg

SEQ ID NO: 369 - RNA, 17 nt, artificial sequence
  misc_feature: oligonucleotide substrate
cuaguaggguggcaucc

SEQ ID NO: 370 - RNA, 17 nt, artificial sequence
  misc_feature: oligonucleotide substrate
guaggguggcaucccuc

SEQ ID NO: 371 - RNA, 17 nt, artificial sequence
  misc_feature: oligonucleotide substrate
aggguggcaucccucuu

SEQ ID NO: 372 - RNA, 17 nt, artificial sequence
  misc_feature: oligonucleotide substrate
cccucuuuacaucugga

SEQ ID NO: 373 - RNA, 17 nt, artificial sequence
  misc_feature: oligonucleotide substrate
cucuuuacaucuggagc

SEQ ID NO: 374 - RNA, 17 nt, artificial sequence
  misc_feature: oligonucleotide substrate
caucuggagcaucucag

SEQ ID NO: 375 - RNA, 17 nt, artificial sequence
  misc_feature: oligonucleotide substrate
ucuggagcaucucagaa

SEQ ID NO: 376 - RNA, 17 nt, artificial sequence
  misc_feature: oligonucleotide substrate
aucucagaauauccagc

SEQ ID NO: 377 - RNA, 17 nt, artificial sequence
  misc_feature: oligonucleotide substrate
cucagaauauccagcuu

SEQ ID NO: 378 - RNA, 17 nt, artificial sequence
  misc_feature: oligonucleotide substrate
aauauccagcuuauuaa

SEQ ID NO: 379 - RNA, 17 nt, artificial sequence
  misc_feature: oligonucleotide substrate
uccagcuuauuaacacc

SEQ ID NO: 380 - RNA, 17 nt, artificial sequence
  misc_feature: oligonucleotide substrate
gcuuauuaacaccaacg

SEQ ID NO: 381 - RNA, 17 nt, artificial sequence
  misc_feature: oligonucleotide substrate
uuauuaacaccaacggc

SEQ ID NO: 382 - RNA, 17 nt, artificial sequence
  misc_feature: oligonucleotide substrate
uaacaccaacggcagcu

SEQ ID NO: 383 - RNA, 17 nt, artificial sequence
  misc_feature: oligonucleotide substrate
caccaacggcagcuggc

SEQ ID NO: 384 - RNA, 17 nt, artificial sequence
  misc_feature: oligonucleotide substrate
caacggcagcuggcaca

SEQ ID NO: 385 - RNA, 17 nt, artificial sequence
  misc_feature: oligonucleotide substrate
ggcagcuggcacauuaa

SEQ ID NO: 386 - RNA, 17 nt, artificial sequence
  misc_feature: oligonucleotide substrate
cagcuggcacauuaaca

SEQ ID NO: 387 - RNA, 17 nt, artificial sequence
  misc_feature: oligonucleotide substrate
gcuggcacauuaacagg

SEQ ID NO: 388 - RNA, 17 nt, artificial sequence
  misc_feature: oligonucleotide substrate
gcacauuaacaggacug

SEQ ID NO: 389 - RNA, 17 nt, artificial sequence
  misc_feature: oligonucleotide substrate
uuaacaggacugcccug

SEQ ID NO: 390 - RNA, 17 nt, artificial sequence
  misc_feature: oligonucleotide substrate
acaggacugcccugaac

SEQ ID NO: 391 - RNA, 17 nt, artificial sequence
  misc_feature: oligonucleotide substrate
ugcccugaacugcaaug

SEQ ID NO: 392 - RNA, 17 nt, artificial sequence
  misc_feature: oligonucleotide substrate
ccugaacugcaaugacu

SEQ ID NO: 393 - RNA, 17 nt, artificial sequence
  misc_feature: oligonucleotide substrate
gaacugcaaugacuccc

SEQ ID NO: 394 - RNA, 17 nt, artificial sequence
  misc_feature: oligonucleotide substrate
cugcaaugacucccucc

SEQ ID NO: 395 - RNA, 17 nt, artificial sequence
  misc_feature: oligonucleotide substrate
cccuccaaaccggguuc

SEQ ID NO: 396 - RNA, 17 nt, artificial sequence
  misc_feature: oligonucleotide substrate
caaaccggguucauugc

SEQ ID NO: 397 - RNA, 17 nt, artificial sequence
  misc_feature: oligonucleotide substrate
ccggguucauugcugca

SEQ ID NO: 398 - RNA, 17 nt, artificial sequence
  misc_feature: oligonucleotide substrate
gguucauugcugcacug

SEQ ID NO: 399 - RNA, 17 nt, artificial sequence
  misc_feature: oligonucleotide substrate
ucauugcugcacuguuc

SEQ ID NO: 400 - RNA, 17 nt, artificial sequence
  misc_feature: oligonucleotide substrate
auugcugcacuguucua

SEQ ID NO: 401 - RNA, 17 nt, artificial sequence
  misc_feature: oligonucleotide substrate
gcugcacuguucuaugc

SEQ ID NO: 402 - RNA, 17 nt, artificial sequence
  misc_feature: oligonucleotide substrate
acuguucuaugcacaca

SEQ ID NO: 403 - RNA, 17 nt, artificial sequence
  misc_feature: oligonucleotide substrate
uguucuaugcacacagg

SEQ ID NO: 404 - RNA, 17 nt, artificial sequence
  misc_feature: oligonucleotide substrate
uucuaugcacacagguu

SEQ ID NO: 405 - RNA, 17 nt, artificial sequence
  misc_feature: oligonucleotide substrate
cuaugcacacagguuca

SEQ ID NO: 406 - RNA, 17 nt, artificial sequence
  misc_feature: oligonucleotide substrate
gcacacagguucaacuc

SEQ ID NO: 407 - RNA, 17 nt, artificial sequence
  misc_feature: oligonucleotide substrate
cagguucaacucguccg

SEQ ID NO: 408 - RNA, 17 nt, artificial sequence
  misc_feature: oligonucleotide substrate
uucaacucguccggaug

SEQ ID NO: 409 - RNA, 17 nt, artificial sequence
  misc_feature: oligonucleotide substrate
ucguccggaugcccaca

SEQ ID NO: 410 - RNA, 17 nt, artificial sequence
  misc_feature: oligonucleotide substrate
guccggaugcccacagc

SEQ ID NO: 411 - RNA, 17 nt, artificial sequence
  misc_feature: oligonucleotide substrate
ggaugcccacagcgcuu

SEQ ID NO: 412 - RNA, 17 nt, artificial sequence
  misc_feature: oligonucleotide substrate
ugcccacagcgcuuggc

SEQ ID NO: 413 - RNA, 17 nt, artificial sequence
  misc_feature: oligonucleotide substrate
cccacagcgcuuggcca

SEQ ID NO: 414 - RNA, 17 nt, artificial sequence
  misc_feature: oligonucleotide substrate
agcgcuuggccagcugc

SEQ ID NO: 415 - RNA, 17 nt, artificial sequence
  misc_feature: oligonucleotide substrate
cuuggccagcugccgcu

SEQ ID NO: 416 - RNA, 17 nt, artificial sequence
  misc_feature: oligonucleotide substrate
ggccagcugccgcucca

SEQ ID NO: 417 - RNA, 17 nt, artificial sequence
  misc_feature: oligonucleotide substrate
cagcugccgcuccauug

SEQ ID NO: 418 - RNA, 17 nt, artificial sequence
  misc_feature: oligonucleotide substrate
gccgcuccauugacaag

SEQ ID NO: 419 - RNA, 17 nt, artificial sequence
  misc_feature: oligonucleotide substrate
cuccauugacaaguucg

SEQ ID NO: 420 - RNA, 17 nt, artificial sequence
  misc_feature: oligonucleotide substrate
auugacaaguucgcuca

SEQ ID NO: 421 - RNA, 17 nt, artificial sequence
  misc_feature: oligonucleotide substrate
acaaguucgcucagggg

SEQ ID NO: 422 - RNA, 17 nt, artificial sequence
  misc_feature: oligonucleotide substrate
gcucagggguggggucc

SEQ ID NO: 423 - RNA, 17 nt, artificial sequence
  misc_feature: oligonucleotide substrate
ggggugggguccuauca

SEQ ID NO: 424 - RNA, 17 nt, artificial sequence
  misc_feature: oligonucleotide substrate
gggguccuaucaccuac

SEQ ID NO: 425 - RNA, 17 nt, artificial sequence
  misc_feature: oligonucleotide substrate
guccuaucaccuacacc

SEQ ID NO: 426 - RNA, 17 nt, artificial sequence
  misc_feature: oligonucleotide substrate
uaucaccuacaccgagg

SEQ ID NO: 427 - RNA, 17 nt, artificial sequence
  misc_feature: oligonucleotide substrate
ucaccuacaccgagggc

SEQ ID NO: 428 - RNA, 17 nt, artificial sequence
  misc_feature: oligonucleotide substrate
caccgagggccacaacu

SEQ ID NO: 429 - RNA, 17 nt, artificial sequence
  misc_feature: oligonucleotide substrate
cgagggccacaacucgg

SEQ ID NO: 430 - RNA, 17 nt, artificial sequence
  misc_feature: oligonucleotide substrate
gggccacaacucggacc

SEQ ID NO: 431 - RNA, 17 nt, artificial sequence
  misc_feature: oligonucleotide substrate
caacucggaccagaggc

SEQ ID NO: 432 - RNA, 17 nt, artificial sequence
  misc_feature: oligonucleotide substrate
gaccagaggcccuauug

SEQ ID NO: 433 - RNA, 17 nt, artificial sequence
  misc_feature: oligonucleotide substrate
gaggcccuauugcuggc

SEQ ID NO: 434 - RNA, 17 nt, artificial sequence
  misc_feature: oligonucleotide substrate
gcccuauugcuggcacu

SEQ ID NO: 435 - RNA, 17 nt, artificial sequence
  misc_feature: oligonucleotide substrate
uauugcuggcacuacgc

SEQ ID NO: 436 - RNA, 17 nt, artificial sequence
  misc_feature: oligonucleotide substrate
uugcuggcacuacgcac

SEQ ID NO: 437 - RNA, 17 nt, artificial sequence
  misc_feature: oligonucleotide substrate
cuggcacuacgcaccgc

SEQ ID NO: 438 - RNA, 17 nt, artificial sequence
  misc_feature: oligonucleotide substrate
ggcacuacgcaccgcgg

SEQ ID NO: 439 - RNA, 17 nt, artificial sequence
  misc_feature: oligonucleotide substrate
cacuacgcaccgcggcc

SEQ ID NO: 440 - RNA, 17 nt, artificial sequence
  misc_feature: oligonucleotide substrate
uacgcaccgcggccgug

SEQ ID NO: 441 - RNA, 17 nt, artificial sequence
  misc_feature: oligonucleotide substrate
gcaccgcggccgugugg

SEQ ID NO: 442 - RNA, 17 nt, artificial sequence
  misc_feature: oligonucleotide substrate
ccgcggccgugugguau

SEQ ID NO: 443 - RNA, 17 nt, artificial sequence
  misc_feature: oligonucleotide substrate
gcggccgugugguaucg

SEQ ID NO: 444 - RNA, 17 nt, artificial sequence
  misc_feature: oligonucleotide substrate
gccgugugguaucguac

SEQ ID NO: 445 - RNA, 17 nt, artificial sequence
  misc_feature: oligonucleotide substrate
cgugugguaucguaccc

SEQ ID NO: 446 - RNA, 17 nt, artificial sequence
  misc_feature: oligonucleotide substrate
gugguaucguacccgca

SEQ ID NO: 447 - RNA, 17 nt, artificial sequence
  misc_feature: oligonucleotide substrate
gguaucguacccgcauc

SEQ ID NO: 448 - RNA, 17 nt, artificial sequence
  misc_feature: oligonucleotide substrate
ucguacccgcaucgcag

SEQ ID NO: 449 - RNA, 17 nt, artificial sequence
  misc_feature: oligonucleotide substrate
guacccgcaucgcaggu

SEQ ID NO: 450 - RNA, 17 nt, artificial sequence
  misc_feature: oligonucleotide substrate
cccgcaucgcagguaug

SEQ ID NO: 451 - RNA, 17 nt, artificial sequence
  misc_feature: oligonucleotide substrate
caucgcagguauguggu

SEQ ID NO: 452 - RNA, 17 nt, artificial sequence
  misc_feature: oligonucleotide substrate
ucgcagguauguggucc

SEQ ID NO: 453 - RNA, 17 nt, artificial sequence
  misc_feature: oligonucleotide substrate
gcagguaugugguccag

SEQ ID NO: 454 - RNA, 17 nt, artificial sequence
  misc_feature: oligonucleotide substrate
gguaugugguccagugu

SEQ ID NO: 455 - RNA, 17 nt, artificial sequence
  misc_feature: oligonucleotide substrate
gugguccaguguauugc

SEQ ID NO: 456 - RNA, 17 nt, artificial sequence
  misc_feature: oligonucleotide substrate
gguccaguguauugcuu

SEQ ID NO: 457 - RNA, 17 nt, artificial sequence
  misc_feature: oligonucleotide substrate
uccaguguauugcuuca

SEQ ID NO: 458 - RNA, 17 nt, artificial sequence
  misc_feature: oligonucleotide substrate
aguguauugcuucaccc

SEQ ID NO: 459 - RNA, 17 nt, artificial sequence
  misc_feature: oligonucleotide substrate
auugcuucaccccaagc

SEQ ID NO: 460 - RNA, 17 nt, artificial sequence
  misc_feature: oligonucleotide substrate
caccccaagcccuguug

SEQ ID NO: 461 - RNA, 17 nt, artificial sequence
  misc_feature: oligonucleotide substrate
caagcccuguuguggug

SEQ ID NO: 462 - RNA, 17 nt, artificial sequence
  misc_feature: oligonucleotide substrate
gcccuguuguggugggg

SEQ ID NO: 463 - RNA, 17 nt, artificial sequence
  misc_feature: oligonucleotide substrate
cuguugugguggggacg

SEQ ID NO: 464 - RNA, 17 nt, artificial sequence
  misc_feature: oligonucleotide substrate
ugguggggacgaccgac

SEQ ID NO: 465 - RNA, 17 nt, artificial sequence
  misc_feature: oligonucleotide substrate
uggggacgaccgaccgu

SEQ ID NO: 466 - RNA, 17 nt, artificial sequence
  misc_feature: oligonucleotide substrate
gacgaccgaccguuucg

SEQ ID NO: 467 - RNA, 17 nt, artificial sequence
  misc_feature: oligonucleotide substrate
gaccgaccguuucggcg

SEQ ID NO: 468 - RNA, 17 nt, artificial sequence
  misc_feature: oligonucleotide substrate
ccguuucggcgccccca

SEQ ID NO: 469 - RNA, 17 nt, artificial sequence
  misc_feature: oligonucleotide substrate
guuucggcgcccccacg

SEQ ID NO: 470 - RNA, 17 nt, artificial sequence
  misc_feature: oligonucleotide substrate
gcgcccccacguauaac

SEQ ID NO: 471 - RNA, 17 nt, artificial sequence
  misc_feature: oligonucleotide substrate
gcccccacguauaacug

SEQ ID NO: 472 - RNA, 17 nt, artificial sequence
  misc_feature: oligonucleotide substrate
ccccacguauaacuggg

SEQ ID NO: 473 - RNA, 17 nt, artificial sequence
  misc_feature: oligonucleotide substrate
cacguauaacugggggg

SEQ ID NO: 474 - RNA, 17 nt, artificial sequence
  misc_feature: oligonucleotide substrate
acuggggggcgaacgag

SEQ ID NO: 475 - RNA, 17 nt, artificial sequence
  misc_feature: oligonucleotide substrate
gggggcgaacgagacgg

SEQ ID NO: 476 - RNA, 17 nt, artificial sequence
  misc_feature: oligonucleotide substrate
cgaacgagacggacgug

SEQ ID NO: 477 - RNA, 17 nt, artificial sequence
  misc_feature: oligonucleotide substrate
cgagacggacgugcugc

SEQ ID NO: 478 - RNA, 17 nt, artificial sequence
  misc_feature: oligonucleotide substrate
agacggacgugcugcuc

SEQ ID NO: 479 - RNA, 17 nt, artificial sequence
  misc_feature: oligonucleotide substrate
acggacgugcugcuccu

SEQ ID NO: 480 - RNA, 17 nt, artificial sequence
  misc_feature: oligonucleotide substrate
gacgugcugcuccucaa

SEQ ID NO: 481 - RNA, 17 nt, artificial sequence
  misc_feature: oligonucleotide substrate
gcuccucaacaacacgc

SEQ ID NO: 482 - RNA, 17 nt, artificial sequence
  misc_feature: oligonucleotide substrate
ccucaacaacacgcggc

SEQ ID NO: 483 - RNA, 17 nt, artificial sequence
  misc_feature: oligonucleotide substrate
ucaacaacacgcggccg

SEQ ID NO: 484 - RNA, 17 nt, artificial sequence
  misc_feature: oligonucleotide substrate
aacaacacgcggccgcc

SEQ ID NO: 485 - RNA, 17 nt, artificial sequence
  misc_feature: oligonucleotide substrate
aacacgcggccgccgca

SEQ ID NO: 486 - RNA, 17 nt, artificial sequence
  misc_feature: oligonucleotide substrate
acgcggccgccgcaagg

SEQ ID NO: 487 - RNA, 17 nt, artificial sequence
  misc_feature: oligonucleotide substrate
cggccgccgcaaggcaa

SEQ ID NO: 488 - RNA, 17 nt, artificial sequence
  misc_feature: oligonucleotide substrate
gccgcaaggcaacuggu

SEQ ID NO: 489 - RNA, 17 nt, artificial sequence
  misc_feature: oligonucleotide substrate
gcaaggcaacugguucg

SEQ ID NO: 490 - RNA, 17 nt, artificial sequence
  misc_feature: oligonucleotide substrate
ggcaacugguucggcug

SEQ ID NO: 491 - RNA, 17 nt, artificial sequence
  misc_feature: oligonucleotide substrate
cugguucggcugcacau

SEQ ID NO: 492 - RNA, 17 nt, artificial sequence
  misc_feature: oligonucleotide substrate
guucggcugcacaugga

SEQ ID NO: 493 - RNA, 17 nt, artificial sequence
  misc_feature: oligonucleotide substrate
ucggcugcacauggaug

SEQ ID NO: 494 - RNA, 17 nt, artificial sequence
  misc_feature: oligonucleotide substrate
ggcugcacauggaugaa

SEQ ID NO: 495 - RNA, 17 nt, artificial sequence
  misc_feature: oligonucleotide substrate
gcacauggaugaauggc

SEQ ID NO: 496 - RNA, 17 nt, artificial sequence
  misc_feature: oligonucleotide substrate
auggaugaauggcacug

SEQ ID NO: 497 - RNA, 17 nt, artificial sequence
  misc_feature: oligonucleotide substrate
gaugaauggcacugggu

SEQ ID NO: 498 - RNA, 17 nt, artificial sequence
  misc_feature: oligonucleotide substrate
ugaauggcacuggguuc

SEQ ID NO: 499 - RNA, 17 nt, artificial sequence
  misc_feature: oligonucleotide substrate
ggcacuggguucaccaa

SEQ ID NO: 500 - RNA, 17 nt, artificial sequence
  misc_feature: oligonucleotide substrate
cuggguucaccaagacg

SEQ ID NO: 501 - RNA, 17 nt, artificial sequence
  misc_feature: oligonucleotide substrate
ucaccaagacgugcggg

SEQ ID NO: 502 - RNA, 17 nt, artificial sequence
  misc_feature: oligonucleotide substrate
accaagacgugcggggg

SEQ ID NO: 503 - RNA, 17 nt, artificial sequence
  misc_feature: oligonucleotide substrate
caagacgugcgggggcc

SEQ ID NO: 504 - RNA, 17 nt, artificial sequence
  misc_feature: oligonucleotide substrate
gugcgggggccccccgu

SEQ ID NO: 505 - RNA, 17 nt, artificial sequence
  misc_feature: oligonucleotide substrate
ggccccccgugcaacau

SEQ ID NO: 506 - RNA, 17 nt, artificial sequence
  misc_feature: oligonucleotide substrate
ccccccgugcaacaucg

SEQ ID NO: 507 - RNA, 17 nt, artificial sequence
  misc_feature: oligonucleotide substrate
cccgugcaacaucgggg

SEQ ID NO: 508 - RNA, 17 nt, artificial sequence
  misc_feature: oligonucleotide substrate
cgugcaacaucgggggg

SEQ ID NO: 509 - RNA, 17 nt, artificial sequence
  misc_feature: oligonucleotide substrate
ucgggggggccgguaac

SEQ ID NO: 510 - RNA, 17 nt, artificial sequence
  misc_feature: oligonucleotide substrate
gggggccgguaacgaca

SEQ ID NO: 511 - RNA, 17 nt, artificial sequence
  misc_feature: oligonucleotide substrate
ggccgguaacgacaccu

SEQ ID NO: 512 - RNA, 17 nt, artificial sequence
  misc_feature: oligonucleotide substrate
cgguaacgacaccuuaa

SEQ ID NO: 513 - RNA, 17 nt, artificial sequence
  misc_feature: oligonucleotide substrate
guaacgacaccuuaacc

SEQ ID NO: 514 - RNA, 17 nt, artificial sequence
  misc_feature: oligonucleotide substrate
acaccuuaaccugcccc

SEQ ID NO: 515 - RNA, 17 nt, artificial sequence
  misc_feature: oligonucleotide substrate
cuuaaccugccccacgg

SEQ ID NO: 516 - RNA, 17 nt, artificial sequence
  misc_feature: oligonucleotide substrate
ccugccccacggacugc

SEQ ID NO: 517 - RNA, 17 nt, artificial sequence
  misc_feature: oligonucleotide substrate
ccccacggacugcuucc

SEQ ID NO: 518 - RNA, 17 nt, artificial sequence
  misc_feature: oligonucleotide substrate
cacggacugcuuccgga

SEQ ID NO: 519 - RNA, 17 nt, artificial sequence
  misc_feature: oligonucleotide substrate
uuccggaagcaccccga

SEQ ID NO: 520 - RNA, 17 nt, artificial sequence
  misc_feature: oligonucleotide substrate
ccggaagcaccccgagg

SEQ ID NO: 521 - RNA, 17 nt, artificial sequence
  misc_feature: oligonucleotide substrate
accccgaggccacuuac

SEQ ID NO: 522 - RNA, 17 nt, artificial sequence
  misc_feature: oligonucleotide substrate
ccgaggccacuuacgca

SEQ ID NO: 523 - RNA, 17 nt, artificial sequence
  misc_feature: oligonucleotide substrate
ggccacuuacgcaaagu

SEQ ID NO: 524 - RNA, 17 nt, artificial sequence
  misc_feature: oligonucleotide substrate
ccacuuacgcaaagugc

SEQ ID NO: 525 - RNA, 17 nt, artificial sequence
  misc_feature: oligonucleotide substrate
uacgcaaagugcgguuc

SEQ ID NO: 526 - RNA, 17 nt, artificial sequence
  misc_feature: oligonucleotide substrate
cgcaaagugcgguucgg

SEQ ID NO: 527 - RNA, 17 nt, artificial sequence
  misc_feature: oligonucleotide substrate
aaagugcgguucggggc

SEQ ID NO: 528 - RNA, 17 nt, artificial sequence
  misc_feature: oligonucleotide substrate
gguucggggccuugguu

SEQ ID NO: 529 - RNA, 17 nt, artificial sequence
  misc_feature: oligonucleotide substrate
gggccuugguuaacacc

SEQ ID NO: 530 - RNA, 17 nt, artificial sequence
  misc_feature: oligonucleotide substrate
cuugguuaacaccuaga

SEQ ID NO: 531 - RNA, 17 nt, artificial sequence
  misc_feature: oligonucleotide substrate
ugguuaacaccuagaug

SEQ ID NO: 532 - RNA, 17 nt, artificial sequence
  misc_feature: oligonucleotide substrate
acaccuagaugcauagu

SEQ ID NO: 533 - RNA, 17 nt, artificial sequence
  misc_feature: oligonucleotide substrate
accuagaugcauaguug

SEQ ID NO: 534 - RNA, 17 nt, artificial sequence
  misc_feature: oligonucleotide substrate
cuagaugcauaguugac

SEQ ID NO: 535 - RNA, 17 nt, artificial sequence
  misc_feature: oligonucleotide substrate
gaugcauaguugacuac

SEQ ID NO: 536 - RNA, 17 nt, artificial sequence
  misc_feature: oligonucleotide substrate
cauaguugacuacccau

SEQ ID NO: 537 - RNA, 17 nt, artificial sequence
  misc_feature: oligonucleotide substrate
aguugacuacccauaca

SEQ ID NO: 538 - RNA, 17 nt, artificial sequence
  misc_feature: oligonucleotide substrate
gacuacccauacaggcu

SEQ ID NO: 539 - RNA, 17 nt, artificial sequence
  misc_feature: oligonucleotide substrate
cuacccauacaggcuuu

SEQ ID NO: 540 - RNA, 17 nt, artificial sequence
  misc_feature: oligonucleotide substrate
ccauacaggcuuuggca

SEQ ID NO: 541 - RNA, 17 nt, artificial sequence
  misc_feature: oligonucleotide substrate
aggcuuuggcacuaccc

SEQ ID NO: 542 - RNA, 17 nt, artificial sequence
  misc_feature: oligonucleotide substrate
gcuuuggcacuaccccu

SEQ ID NO: 543 - RNA, 17 nt, artificial sequence
  misc_feature: oligonucleotide substrate
uuggcacuaccccugca

SEQ ID NO: 544 - RNA, 17 nt, artificial sequence
  misc_feature: oligonucleotide substrate
cuaccccugcacuguca

SEQ ID NO: 545 - RNA, 17 nt, artificial sequence
  misc_feature: oligonucleotide substrate
accccugcacugucaau

SEQ ID NO: 546 - RNA, 17 nt, artificial sequence
  misc_feature: oligonucleotide substrate
ccugcacugucaauuuu

SEQ ID NO: 547 - RNA, 17 nt, artificial sequence
  misc_feature: oligonucleotide substrate
cacugucaauuuuucca

SEQ ID NO: 548 - RNA, 17 nt, artificial sequence
  misc_feature: oligonucleotide substrate
auuuuuccaucuuuaag

SEQ ID NO: 549 - RNA, 17 nt, artificial sequence
  misc_feature: oligonucleotide substrate
ucuuuaagguuaggaug

SEQ ID NO: 550 - RNA, 17 nt, artificial sequence
  misc_feature: oligonucleotide substrate
agguuaggauguaugug

SEQ ID NO: 551 - RNA, 17 nt, artificial sequence
  misc_feature: oligonucleotide substrate
guuaggauguauguggg

SEQ ID NO: 552 - RNA, 17 nt, artificial sequence
  misc_feature: oligonucleotide substrate
uaggauguauguggggg

SEQ ID NO: 553 - RNA, 17 nt, artificial sequence
  misc_feature: oligonucleotide substrate
ggauguauguggggggc

SEQ ID NO: 554 - RNA, 17 nt, artificial sequence
  misc_feature: oligonucleotide substrate
uguggggggcguggagc

SEQ ID NO: 555 - RNA, 17 nt, artificial sequence
  misc_feature: oligonucleotide substrate
uggggggcguggagcac

SEQ ID NO: 556 - RNA, 17 nt, artificial sequence
  misc_feature: oligonucleotide substrate
ggcguggagcacaggcu

SEQ ID NO: 557 - RNA, 17 nt, artificial sequence
  misc_feature: oligonucleotide substrate
cguggagcacaggcuca

SEQ ID NO: 558 - RNA, 17 nt, artificial sequence
  misc_feature: oligonucleotide substrate
gagcacaggcucaccgc

SEQ ID NO: 559 - RNA, 17 nt, artificial sequence
  misc_feature: oligonucleotide substrate
acaggcucaccgccgca

SEQ ID NO: 560 - RNA, 17 nt, artificial sequence
  misc_feature: oligonucleotide substrate
ggcucaccgccgcaugc

SEQ ID NO: 561 - RNA, 17 nt, artificial sequence
  misc_feature: oligonucleotide substrate
ucaccgccgcaugcaau

SEQ ID NO: 562 - RNA, 17 nt, artificial sequence
  misc_feature: oligonucleotide substrate
accgccgcaugcaauug

SEQ ID NO: 563 - RNA, 17 nt, artificial sequence
  misc_feature: oligonucleotide substrate
cgccgcaugcaauugga

SEQ ID NO: 564 - RNA, 17 nt, artificial sequence
  misc_feature: oligonucleotide substrate
cgcaugcaauuggacuc

SEQ ID NO: 565 - RNA, 17 nt, artificial sequence
  misc_feature: oligonucleotide substrate
gcaauuggacucgagga

SEQ ID NO: 566 - RNA, 17 nt, artificial sequence
  misc_feature: oligonucleotide substrate
cgaggagagcguuguga

SEQ ID NO: 567 - RNA, 17 nt, artificial sequence
  misc_feature: oligonucleotide substrate
aggagagcguugugauu

SEQ ID NO: 568 - RNA, 17 nt, artificial sequence
  misc_feature: oligonucleotide substrate
agagcguugugauuugg

SEQ ID NO: 569 - RNA, 17 nt, artificial sequence
  misc_feature: oligonucleotide substrate
gcguugugauuuggagg

SEQ ID NO: 570 - RNA, 17 nt, artificial sequence
  misc_feature: oligonucleotide substrate
uuuggaggacagggaca

SEQ ID NO: 571 - RNA, 17 nt, artificial sequence
  misc_feature: oligonucleotide substrate
ggacagggacagaucag

SEQ ID NO: 572 - RNA, 17 nt, artificial sequence
  misc_feature: oligonucleotide substrate
agggacagaucagagcu

SEQ ID NO: 573 - RNA, 17 nt, artificial sequence
  misc_feature: oligonucleotide substrate
agaucagagcucagccc

SEQ ID NO: 574 - RNA, 17 nt, artificial sequence
  misc_feature: oligonucleotide substrate
agagcucagcccgcugc

SEQ ID NO: 575 - RNA, 17 nt, artificial sequence
  misc_feature: oligonucleotide substrate
cucagcccgcugcuguu

SEQ ID NO: 576 - RNA, 17 nt, artificial sequence
  misc_feature: oligonucleotide substrate
agcccgcugcuguuguc

SEQ ID NO: 577 - RNA, 17 nt, artificial sequence
  misc_feature: oligonucleotide substrate
ccgcugcuguuguccac

SEQ ID NO: 578 - RNA, 17 nt, artificial sequence
  misc_feature: oligonucleotide substrate
cugcuguuguccacuac

SEQ ID NO: 579 - RNA, 17 nt, artificial sequence
  misc_feature: oligonucleotide substrate
uguuguccacuacagag

SEQ ID NO: 580 - RNA, 17 nt, artificial sequence
  misc_feature: oligonucleotide substrate
uguccacuacagagugg

SEQ ID NO: 581 - RNA, 17 nt, artificial sequence
  misc_feature: oligonucleotide substrate
acuacagaguggcaaau

SEQ ID NO: 582 - RNA, 17 nt, artificial sequence
  misc_feature: oligonucleotide substrate
acagaguggcaaauacu

SEQ ID NO: 583 - RNA, 17 nt, artificial sequence
  misc_feature: oligonucleotide substrate
aguggcaaauacugccc

SEQ ID NO: 584 - RNA, 17 nt, artificial sequence
  misc_feature: oligonucleotide substrate
uggcaaauacugcccug

SEQ ID NO: 585 - RNA, 17 nt, artificial sequence
  misc_feature: oligonucleotide substrate
caaauacugcccugcuc

SEQ ID NO: 586 - RNA, 17 nt, artificial sequence
  misc_feature: oligonucleotide substrate
acugcccugcuccuuca

SEQ ID NO: 587 - RNA, 17 nt, artificial sequence
  misc_feature: oligonucleotide substrate
gcuccuucaccacccua

SEQ ID NO: 588 - RNA, 17 nt, artificial sequence
  misc_feature: oligonucleotide substrate
ccuucaccacccuaccg

SEQ ID NO: 589 - RNA, 17 nt, artificial sequence
  misc_feature: oligonucleotide substrate
accacccuaccggcucu

SEQ ID NO: 590 - RNA, 17 nt, artificial sequence
  misc_feature: oligonucleotide substrate
cccuaccggcucugucc

SEQ ID NO: 591 - RNA, 17 nt, artificial sequence
  misc_feature: oligonucleotide substrate
ccggcucuguccacugg

SEQ ID NO: 592 - RNA, 17 nt, artificial sequence
  misc_feature: oligonucleotide substrate
cucuguccacugguuug

SEQ ID NO: 593 - RNA, 17 nt, artificial sequence
  misc_feature: oligonucleotide substrate
guccacugguuugaucc

SEQ ID NO: 594 - RNA, 17 nt, artificial sequence
  misc_feature: oligonucleotide substrate
cugguuugauccaucuc

SEQ ID NO: 595 - RNA, 17 nt, artificial sequence
  misc_feature: oligonucleotide substrate
uuugauccaucuccacc

SEQ ID NO: 596 - RNA, 17 nt, artificial sequence
  misc_feature: oligonucleotide substrate
ccaucuccaccagaaca

SEQ ID NO: 597 - RNA, 17 nt, artificial sequence
  misc_feature: oligonucleotide substrate
ccaccagaacaucgugg

SEQ ID NO: 598 - RNA, 17 nt, artificial sequence
  misc_feature: oligonucleotide substrate
accagaacaucguggac

SEQ ID NO: 599 - RNA, 17 nt, artificial sequence
  misc_feature: oligonucleotide substrate
agaacaucguggacgug

SEQ ID NO: 600 - RNA, 17 nt, artificial sequence
  misc_feature: oligonucleotide substrate
caucguggacgugcaau

SEQ ID NO: 601 - RNA, 17 nt, artificial sequence
  misc_feature: oligonucleotide substrate
ucguggacgugcaauac

SEQ ID NO: 602 - RNA, 17 nt, artificial sequence
  misc_feature: oligonucleotide substrate
guggacgugcaauaccu

SEQ ID NO: 603 - RNA, 17 nt, artificial sequence
  misc_feature: oligonucleotide substrate
gacgugcaauaccugua

SEQ ID NO: 604 - RNA, 17 nt, artificial sequence
  misc_feature: oligonucleotide substrate
cgugcaauaccuguacg

SEQ ID NO: 605 - RNA, 17 nt, artificial sequence
  misc_feature: oligonucleotide substrate
caauaccuguacggugu

SEQ ID NO: 606 - RNA, 17 nt, artificial sequence
  misc_feature: oligonucleotide substrate
auaccuguacgguguag

SEQ ID NO: 607 - RNA, 17 nt, artificial sequence
  misc_feature: oligonucleotide substrate
ccuguacgguguagggu

SEQ ID NO: 608 - RNA, 17 nt, artificial sequence
  misc_feature: oligonucleotide substrate
uguacgguguaggguca

SEQ ID NO: 609 - RNA, 17 nt, artificial sequence
  misc_feature: oligonucleotide substrate
gguguagggucagcggu

SEQ ID NO: 610 - RNA, 17 nt, artificial sequence
  misc_feature: oligonucleotide substrate
uagggucagcgguuguc

SEQ ID NO: 611 - RNA, 17 nt, artificial sequence
  misc_feature: oligonucleotide substrate
ggucagcgguugucucc

SEQ ID NO: 612 - RNA, 17 nt, artificial sequence
  misc_feature: oligonucleotide substrate
cagcgguugucuccuuc

SEQ ID NO: 613 - RNA, 17 nt, artificial sequence
  misc_feature: oligonucleotide substrate
ucuccuucgcaaucaaa

SEQ ID NO: 614 - RNA, 17 nt, artificial sequence
  misc_feature: oligonucleotide substrate
ccuucgcaaucaaaugg

SEQ ID NO: 615 - RNA, 17 nt, artificial sequence
  misc_feature: oligonucleotide substrate
gcaaucaaaugggagua

SEQ ID NO: 616 - RNA, 17 nt, artificial sequence
  misc_feature: oligonucleotide substrate
aaaugggaguauguccu

SEQ ID NO: 617 - RNA, 17 nt, artificial sequence
  misc_feature: oligonucleotide substrate
augggaguauguccugu

SEQ ID NO: 618 - RNA, 17 nt, artificial sequence
  misc_feature: oligonucleotide substrate
gggaguauguccuguug

SEQ ID NO: 619 - RNA, 17 nt, artificial sequence
  misc_feature: oligonucleotide substrate
uauguccuguugcuuuu

SEQ ID NO: 620 - RNA, 17 nt, artificial sequence
  misc_feature: oligonucleotide substrate
guccuguugcuuuuccu

SEQ ID NO: 621 - RNA, 17 nt, artificial sequence
  misc_feature: oligonucleotide substrate
uucuccuggcagacgcg

SEQ ID NO: 622 - RNA, 17 nt, artificial sequence
  misc_feature: oligonucleotide substrate
ccuggcagacgcgcgcg

SEQ ID NO: 623 - RNA, 17 nt, artificial sequence
  misc_feature: oligonucleotide substrate
uggcagacgcgcgcguc

SEQ ID NO: 624 - RNA, 17 nt, artificial sequence
  misc_feature: oligonucleotide substrate
gcagacgcgcgcgucug

SEQ ID NO: 625 - RNA, 17 nt, artificial sequence
  misc_feature: oligonucleotide substrate
agacgcgcgcgucugug

SEQ ID NO: 626 - RNA, 17 nt, artificial sequence
  misc_feature: oligonucleotide substrate
acgcgcgcgucugugcc

SEQ ID NO: 627 - RNA, 17 nt, artificial sequence
  misc_feature: oligonucleotide substrate
gcgcgucugugccuguu

SEQ ID NO: 628 - RNA, 17 nt, artificial sequence
  misc_feature: oligonucleotide substrate
gcgucugugccuguuug

SEQ ID NO: 629 - RNA, 17 nt, artificial sequence
  misc_feature: oligonucleotide substrate
cugugccuguuugugga

SEQ ID NO: 630 - RNA, 17 nt, artificial sequence
  misc_feature: oligonucleotide substrate
gccuguuuguggaugau

SEQ ID NO: 631 - RNA, 17 nt, artificial sequence
  misc_feature: oligonucleotide substrate
guuuguggaugaugcug

SEQ ID NO: 632 - RNA, 17 nt, artificial sequence
  misc_feature: oligonucleotide substrate
uguggaugaugcuguug

SEQ ID NO: 633 - RNA, 17 nt, artificial sequence
  misc_feature: oligonucleotide substrate
uggaugaugcuguuggu

SEQ ID NO: 634 - RNA, 17 nt, artificial sequence
  misc_feature: oligonucleotide substrate
augaugcuguugguagc

SEQ ID NO: 635 - RNA, 17 nt, artificial sequence
  misc_feature: oligonucleotide substrate
ugcuguugguagcccag

SEQ ID NO: 636 - RNA, 17 nt, artificial sequence
  misc_feature: oligonucleotide substrate
uguugguagcccaggcc

SEQ ID NO: 637 - RNA, 17 nt, artificial sequence
  misc_feature: oligonucleotide substrate
uagcccaggccgaggcu

SEQ ID NO: 638 - RNA, 17 nt, artificial sequence
  misc_feature: oligonucleotide substrate
aggccgaggcugcccua

SEQ ID NO: 639 - RNA, 17 nt, artificial sequence
  misc_feature: oligonucleotide substrate
ccgaggcugcccuagag

SEQ ID NO: 640 - RNA, 17 nt, artificial sequence
  misc_feature: oligonucleotide substrate
ccuagagaaccuggugg

SEQ ID NO: 641 - RNA, 17 nt, artificial sequence
  misc_feature: oligonucleotide substrate
agaaccuggugguccuc

SEQ ID NO: 642 - RNA, 17 nt, artificial sequence
  misc_feature: oligonucleotide substrate
accuggugguccucaau

SEQ ID NO: 643 - RNA, 17 nt, artificial sequence
  misc_feature: oligonucleotide substrate
gguccucaaugcagcau

SEQ ID NO: 644 - RNA, 17 nt, artificial sequence
  misc_feature: oligonucleotide substrate
uccucaaugcagcaucc

SEQ ID NO: 645 - RNA, 17 nt, artificial sequence
  misc_feature: oligonucleotide substrate
ucaaugcagcauccuug

SEQ ID NO: 646 - RNA, 17 nt, artificial sequence
  misc_feature: oligonucleotide substrate
aaugcagcauccuuggc

SEQ ID NO: 647 - RNA, 17 nt, artificial sequence
  misc_feature: oligonucleotide substrate
cauccuuggccggagug

SEQ ID NO: 648 - RNA, 17 nt, artificial sequence
  misc_feature: oligonucleotide substrate
uggccggagugcauggc

SEQ ID NO: 649 - RNA, 17 nt, artificial sequence
  misc_feature: oligonucleotide substrate
gccggagugcauggcau

SEQ ID NO: 650 - RNA, 17 nt, artificial sequence
  misc_feature: oligonucleotide substrate
cggagugcauggcaucc

SEQ ID NO: 651 - RNA, 17 nt, artificial sequence
  misc_feature: oligonucleotide substrate
agugcauggcauccucu

SEQ ID NO: 652 - RNA, 17 nt, artificial sequence
  misc_feature: oligonucleotide substrate
ugcauggcauccucucc

SEQ ID NO: 653 - RNA, 17 nt, artificial sequence
  misc_feature: oligonucleotide substrate
ccuuccucguguucuuc

SEQ ID NO: 654 - RNA, 17 nt, artificial sequence
  misc_feature: oligonucleotide substrate
uuccucguguucuucug

SEQ ID NO: 655 - RNA, 17 nt, artificial sequence
  misc_feature: oligonucleotide substrate
guucuucugugcugccu

SEQ ID NO: 656 - RNA, 17 nt, artificial sequence
  misc_feature: oligonucleotide substrate
ucuucugugcugccugg

SEQ ID NO: 657 - RNA, 17 nt, artificial sequence
  misc_feature: oligonucleotide substrate
ucugugcugccugguac

SEQ ID NO: 658 - RNA, 17 nt, artificial sequence
  misc_feature: oligonucleotide substrate
gcugccugguacaucaa

SEQ ID NO: 659 - RNA, 17 nt, artificial sequence
  misc_feature: oligonucleotide substrate
ugccugguacaucaaag

SEQ ID NO: 660 - RNA, 17 nt, artificial sequence
  misc_feature: oligonucleotide substrate
ccugguacaucaaaggc

SEQ ID NO: 661 - RNA, 17 nt, artificial sequence
  misc_feature: oligonucleotide substrate
caucaaaggcaagcugg

SEQ ID NO: 662 - RNA, 17 nt, artificial sequence
  misc_feature: oligonucleotide substrate
aaaggcaagcugguccc

SEQ ID NO: 663 - RNA, 17 nt, artificial sequence
  misc_feature: oligonucleotide substrate
gcaagcuggucccuggg

SEQ ID NO: 664 - RNA, 17 nt, artificial sequence
  misc_feature: oligonucleotide substrate
ucccuggggcggcauau

SEQ ID NO: 665 - RNA, 17 nt, artificial sequence
  misc_feature: oligonucleotide substrate
cuggggcggcauaugcu

SEQ ID NO: 666 - RNA, 17 nt, artificial sequence
  misc_feature: oligonucleotide substrate
ggggcggcauaugcucu

SEQ ID NO: 667 - RNA, 17 nt, artificial sequence
  misc_feature: oligonucleotide substrate
ggcggcauaugcucucu

SEQ ID NO: 668 - RNA, 17 nt, artificial sequence
  misc_feature: oligonucleotide substrate
cggcauaugcucucuac

SEQ ID NO: 669 - RNA, 17 nt, artificial sequence
  misc_feature: oligonucleotide substrate
ugcucucuacggcguau

SEQ ID NO: 670 - RNA, 17 nt, artificial sequence
  misc_feature: oligonucleotide substrate
ucucuacggcguauggc

SEQ ID NO: 671 - RNA, 17 nt, artificial sequence
  misc_feature: oligonucleotide substrate
ucuacggcguauggccg

SEQ ID NO: 672 - RNA, 17 nt, artificial sequence
  misc_feature: oligonucleotide substrate
uacggcguauggccgcu

SEQ ID NO: 673 - RNA, 17 nt, artificial sequence
  misc_feature: oligonucleotide substrate
ggcguauggccgcuacu

SEQ ID NO: 674 - RNA, 17 nt, artificial sequence
  misc_feature: oligonucleotide substrate
guauggccgcuacuccu

SEQ ID NO: 675 - RNA, 17 nt, artificial sequence
  misc_feature: oligonucleotide substrate
uggccgcuacuccugcu

SEQ ID NO: 676 - RNA, 17 nt, artificial sequence
  misc_feature: oligonucleotide substrate
cuacuccugcuccugcu

SEQ ID NO: 677 - RNA, 17 nt, artificial sequence
  misc_feature: oligonucleotide substrate
cugcuccugcuggcguu

SEQ ID NO: 678 - RNA, 17 nt, artificial sequence
  misc_feature: oligonucleotide substrate
uccugcuggcguuacca

SEQ ID NO: 679 - RNA, 17 nt, artificial sequence
  misc_feature: oligonucleotide substrate
cugcuggcguuaccacc

SEQ ID NO: 680 - RNA, 17 nt, artificial sequence
  misc_feature: oligonucleotide substrate
cuggcguuaccaccacg

SEQ ID NO: 681 - RNA, 17 nt, artificial sequence
  misc_feature: oligonucleotide substrate
gcguuaccaccacgggc

SEQ ID NO: 682 - RNA, 17 nt, artificial sequence
  misc_feature: oligonucleotide substrate
uuaccaccacgggcgua

SEQ ID NO: 683 - RNA, 17 nt, artificial sequence
  misc_feature: oligonucleotide substrate
caccacgggcguacgcc

SEQ ID NO: 684 - RNA, 17 nt, artificial sequence
  misc_feature: oligonucleotide substrate
ccacgggcguacgccau

SEQ ID NO: 685 - RNA, 17 nt, artificial sequence
  misc_feature: oligonucleotide substrate
acgggcguacgccaugg

SEQ ID NO: 686 - RNA, 17 nt, artificial sequence
  misc_feature: oligonucleotide substrate
gggcguacgccauggac

SEQ ID NO: 687 - RNA, 17 nt, artificial sequence
  misc_feature: oligonucleotide substrate
cguacgccauggaccgg

SEQ ID NO: 688 - RNA, 17 nt, artificial sequence
  misc_feature: oligonucleotide substrate
cgccauggaccgggaga

SEQ ID NO: 689 - RNA, 17 nt, artificial sequence
  misc_feature: oligonucleotide substrate
accgggagauggccgca

SEQ ID NO: 690 - RNA, 17 nt, artificial sequence
  misc_feature: oligonucleotide substrate
gggagauggccgcaucg

SEQ ID NO: 691 - RNA, 17 nt, artificial sequence
  misc_feature: oligonucleotide substrate
agauggccgcaucgugc

SEQ ID NO: 692 - RNA, 17 nt, artificial sequence
  misc_feature: oligonucleotide substrate
auggccgcaucgugcgg

SEQ ID NO: 693 - RNA, 17 nt, artificial sequence
  misc_feature: oligonucleotide substrate
gccgcaucgugcggagg

SEQ ID NO: 694 - RNA, 17 nt, artificial sequence
  misc_feature: oligonucleotide substrate
cgcaucgugcggaggcg

SEQ ID NO: 695 - RNA, 17 nt, artificial sequence
  misc_feature: oligonucleotide substrate
gugcggaggcgugguuu

SEQ ID NO: 696 - RNA, 17 nt, artificial sequence
  misc_feature: oligonucleotide substrate
gcggaggcgugguuuuu

SEQ ID NO: 697 - RNA, 17 nt, artificial sequence
  misc_feature: oligonucleotide substrate
gaggcgugguuuuugua

SEQ ID NO: 698 - RNA, 17 nt, artificial sequence
  misc_feature: oligonucleotide substrate
ugguuuuuguaggucua

SEQ ID NO: 699 - RNA, 17 nt, artificial sequence
  misc_feature: oligonucleotide substrate
uuuuguaggucuagcac

SEQ ID NO: 700 - RNA, 17 nt, artificial sequence
  misc_feature: oligonucleotide substrate
uaggucuagcacucuug

SEQ ID NO: 701 - RNA, 17 nt, artificial sequence
  misc_feature: oligonucleotide substrate
ggucuagcacucuugac

SEQ ID NO: 702 - RNA, 17 nt, artificial sequence
  misc_feature: oligonucleotide substrate
cacucuugaccuuguca

SEQ ID NO: 703 - RNA, 17 nt, artificial sequence
  misc_feature: oligonucleotide substrate
uugaccuugucaccaua

SEQ ID NO: 704 - RNA, 17 nt, artificial sequence
  misc_feature: oligonucleotide substrate
accuugucaccauacua

SEQ ID NO: 705 - RNA, 17 nt, artificial sequence
  misc_feature: oligonucleotide substrate
uugucaccauacuacaa

SEQ ID NO: 706 - RNA, 17 nt, artificial sequence
  misc_feature: oligonucleotide substrate
gucaccauacuacaaag

SEQ ID NO: 707 - RNA, 17 nt, artificial sequence
  misc_feature: oligonucleotide substrate
accauacuacaaagugu

SEQ ID NO: 708 - RNA, 17 nt, artificial sequence
  misc_feature: oligonucleotide substrate
acuacaaaguguuccuc

SEQ ID NO: 709 - RNA, 17 nt, artificial sequence
  misc_feature: oligonucleotide substrate
uacaaaguguuccucgc

SEQ ID NO: 710 - RNA, 17 nt, artificial sequence
  misc_feature: oligonucleotide substrate
uguuccucgcuaggcuc

SEQ ID NO: 711 - RNA, 17 nt, artificial sequence
  misc_feature: oligonucleotide substrate
cucgcuaggcucauaug

SEQ ID NO: 712 - RNA, 17 nt, artificial sequence
  misc_feature: oligonucleotide substrate
cuaggcucauauggugg

SEQ ID NO: 713 - RNA, 17 nt, artificial sequence
  misc_feature: oligonucleotide substrate
aggcucauauggugguu

SEQ ID NO: 714 - RNA, 17 nt, artificial sequence
  misc_feature: oligonucleotide substrate
cucauauggugguugca

SEQ ID NO: 715 - RNA, 17 nt, artificial sequence
  misc_feature: oligonucleotide substrate
auauggugguugcaaua

SEQ ID NO: 716 - RNA, 17 nt, artificial sequence
  misc_feature: oligonucleotide substrate
uggugguugcaauaccu

SEQ ID NO: 717 - RNA, 17 nt, artificial sequence
  misc_feature: oligonucleotide substrate
ugguugcaauaccuuau

SEQ ID NO: 718 - RNA, 17 nt, artificial sequence
  misc_feature: oligonucleotide substrate
guugcaauaccuuauca

SEQ ID NO: 719 - RNA, 17 nt, artificial sequence
  misc_feature: oligonucleotide substrate
aauaccuuaucaccaga

SEQ ID NO: 720 - RNA, 17 nt, artificial sequence
  misc_feature: oligonucleotide substrate
accuuaucaccagagcc

SEQ ID NO: 721 - RNA, 17 nt, artificial sequence
  misc_feature: oligonucleotide substrate
ucaccagagccgaggcg

SEQ ID NO: 722 - RNA, 17 nt, artificial sequence
  misc_feature: oligonucleotide substrate
gagccgaggcgcaguug

SEQ ID NO: 723 - RNA, 17 nt, artificial sequence
  misc_feature: oligonucleotide substrate
gccgaggcgcaguugca

SEQ ID NO: 724 - RNA, 17 nt, artificial sequence
  misc_feature: oligonucleotide substrate
gaggcgcaguugcaagu

SEQ ID NO: 725 - RNA, 17 nt, artificial sequence
  misc_feature: oligonucleotide substrate
gcgcaguugcaagugug

SEQ ID NO: 726 - RNA, 17 nt, artificial sequence
  misc_feature: oligonucleotide substrate
aguugcaaguguggauc

SEQ ID NO: 727 - RNA, 17 nt, artificial sequence
  misc_feature: oligonucleotide substrate
uugcaaguguggauccc

SEQ ID NO: 728 - RNA, 17 nt, artificial sequence
  misc_feature: oligonucleotide substrate
aaguguggauccccccc

SEQ ID NO: 729 - RNA, 17 nt, artificial sequence
  misc_feature: oligonucleotide substrate
cccccucaacguucggg

SEQ ID NO: 730 - RNA, 17 nt, artificial sequence
  misc_feature: oligonucleotide substrate
cccucaacguucggggg

SEQ ID NO: 731 - RNA, 17 nt, artificial sequence
  misc_feature: oligonucleotide substrate
cggggggggcgcggugc

SEQ ID NO: 732 - RNA, 17 nt, artificial sequence
  misc_feature: oligonucleotide substrate
gggggggcgcggugcca

SEQ ID NO: 733 - RNA, 17 nt, artificial sequence
  misc_feature: oligonucleotide substrate
ggggcgcggugccauca

SEQ ID NO: 734 - RNA, 17 nt, artificial sequence
  misc_feature: oligonucleotide substrate
ggcgcggugccaucauu

SEQ ID NO: 735 - RNA, 17 nt, artificial sequence
  misc_feature: oligonucleotide substrate
gcggugccaucauucuc

SEQ ID NO: 736 - RNA, 17 nt, artificial sequence
  misc_feature: oligonucleotide substrate
gugccaucauucuccuc

SEQ ID NO: 737 - RNA, 17 nt, artificial sequence
  misc_feature: oligonucleotide substrate
uucuccucacgugugug

SEQ ID NO: 738 - RNA, 17 nt, artificial sequence
  misc_feature: oligonucleotide substrate
cuccucacguguguggu

SEQ ID NO: 739 - RNA, 17 nt, artificial sequence
  misc_feature: oligonucleotide substrate
ccucacguguguggucc

SEQ ID NO: 740 - RNA, 17 nt, artificial sequence
  misc_feature: oligonucleotide substrate
ucacgugugugguccac

SEQ ID NO: 741 - RNA, 17 nt, artificial sequence
  misc_feature: oligonucleotide substrate
cgugugugguccaccca

SEQ ID NO: 742 - RNA, 17 nt, artificial sequence
  misc_feature: oligonucleotide substrate
ugugguccacccagagc

SEQ ID NO: 743 - RNA, 17 nt, artificial sequence
  misc_feature: oligonucleotide substrate
cacccagagcuaaucuu

SEQ ID NO: 744 - RNA, 17 nt, artificial sequence
  misc_feature: oligonucleotide substrate
cagagcuaaucuuugac

SEQ ID NO: 745 - RNA, 17 nt, artificial sequence
  misc_feature: oligonucleotide substrate
aaucuuugacaucacca

SEQ ID NO: 746 - RNA, 17 nt, artificial sequence
  misc_feature: oligonucleotide substrate
ucuuugacaucaccaaa

SEQ ID NO: 747 - RNA, 17 nt, artificial sequence
  misc_feature: oligonucleotide substrate
uugacaucaccaaaauu

SEQ ID NO: 748 - RNA, 17 nt, artificial sequence
  misc_feature: oligonucleotide substrate
ucaccaaaauuaugcuc

SEQ ID NO: 749 - RNA, 17 nt, artificial sequence
  misc_feature: oligonucleotide substrate
ccaaaauuaugcucgcc

SEQ ID NO: 750 - RNA, 17 nt, artificial sequence
  misc_feature: oligonucleotide substrate
aaaauuaugcucgccau

SEQ ID NO: 751 - RNA, 17 nt, artificial sequence
  misc_feature: oligonucleotide substrate
uuaugcucgccauacuc

SEQ ID NO: 752 - RNA, 17 nt, artificial sequence
  misc_feature: oligonucleotide substrate
ugcucgccauacucggc

SEQ ID NO: 753 - RNA, 17 nt, artificial sequence
  misc_feature: oligonucleotide substrate
cucgccauacucggccc

SEQ ID NO: 754 - RNA, 17 nt, artificial sequence
  misc_feature: oligonucleotide substrate
cauacucggcccgcuca

SEQ ID NO: 755 - RNA, 17 nt, artificial sequence
  misc_feature: oligonucleotide substrate
cucggcccgcucauggu

SEQ ID NO: 756 - RNA, 17 nt, artificial sequence
  misc_feature: oligonucleotide substrate
gcccgcucauggugcuc

SEQ ID NO: 757 - RNA, 17 nt, artificial sequence
  misc_feature: oligonucleotide substrate
cgcucauggugcuccag

SEQ ID NO: 758 - RNA, 17 nt, artificial sequence
  misc_feature: oligonucleotide substrate
cucauggugcuccaggc

SEQ ID NO: 759 - RNA, 17 nt, artificial sequence
  misc_feature: oligonucleotide substrate
ugcuccaggcugguaua

SEQ ID NO: 760 - RNA, 17 nt, artificial sequence
  misc_feature: oligonucleotide substrate
ccaggcugguauagcaa

SEQ ID NO: 761 - RNA, 17 nt, artificial sequence
  misc_feature: oligonucleotide substrate
aggcugguauagcaaaa

SEQ ID NO: 762 - RNA, 17 nt, artificial sequence
  misc_feature: oligonucleotide substrate
cugguauagcaaaagug

SEQ ID NO: 763 - RNA, 17 nt, artificial sequence
  misc_feature: oligonucleotide substrate
uagcaaaagugccggac

SEQ ID NO: 764 - RNA, 17 nt, artificial sequence
  misc_feature: oligonucleotide substrate
gcaaaagugccggacuu

SEQ ID NO: 765 - RNA, 17 nt, artificial sequence
  misc_feature: oligonucleotide substrate
agugccggacuuugugc

SEQ ID NO: 766 - RNA, 17 nt, artificial sequence
  misc_feature: oligonucleotide substrate
cggacuuugugcgggcu

SEQ ID NO: 767 - RNA, 17 nt, artificial sequence
  misc_feature: oligonucleotide substrate
gacuuugugcgggcuca

SEQ ID NO: 768 - RNA, 17 nt, artificial sequence
  misc_feature: oligonucleotide substrate
uugugcgggcucaaggg

SEQ ID NO: 769 - RNA, 17 nt, artificial sequence
  misc_feature: oligonucleotide substrate
cucaaggggucauccgu

SEQ ID NO: 770 - RNA, 17 nt, artificial sequence
  misc_feature: oligonucleotide substrate
aaggggucauccgugaa

SEQ ID NO: 771 - RNA, 17 nt, artificial sequence
  misc_feature: oligonucleotide substrate
ggucauccgugaaugca

SEQ ID NO: 772 - RNA, 17 nt, artificial sequence
  misc_feature: oligonucleotide substrate
auccgugaaugcauuuu

SEQ ID NO: 773 - RNA, 17 nt, artificial sequence
  misc_feature: oligonucleotide substrate
ccgugaaugcauuuugg

SEQ ID NO: 774 - RNA, 17 nt, artificial sequence
  misc_feature: oligonucleotide substrate
gugaaugcauuuuggug

SEQ ID NO: 775 - RNA, 17 nt, artificial sequence
  misc_feature: oligonucleotide substrate
gcauuuuggugcggaaa

SEQ ID NO: 776 - RNA, 17 nt, artificial sequence
  misc_feature: oligonucleotide substrate
auuuuggugcggaaagu

SEQ ID NO: 777 - RNA, 17 nt, artificial sequence
  misc_feature: oligonucleotide substrate
ugcggaaagucgguggg

SEQ ID NO: 778 - RNA, 17 nt, artificial sequence
  misc_feature: oligonucleotide substrate
gaaagucgguggggggc

SEQ ID NO: 779 - RNA, 17 nt, artificial sequence
  misc_feature: oligonucleotide substrate
gguggggggcaauaugu

SEQ ID NO: 780 - RNA, 17 nt, artificial sequence
  misc_feature: oligonucleotide substrate
ggggggcaauaugucca

SEQ ID NO: 781 - RNA, 17 nt, artificial sequence
  misc_feature: oligonucleotide substrate
ggggcaauauguccaaa

SEQ ID NO: 782 - RNA, 17 nt, artificial sequence
  misc_feature: oligonucleotide substrate
ggcaauauguccaaaug

SEQ ID NO: 783 - RNA, 17 nt, artificial sequence
  misc_feature: oligonucleotide substrate
auguccaaauggccuuc

SEQ ID NO: 784 - RNA, 17 nt, artificial sequence
  misc_feature: oligonucleotide substrate
uccaaauggccuucaug

SEQ ID NO: 785 - RNA, 17 nt, artificial sequence
  misc_feature: oligonucleotide substrate
uggccuucaugaaguug

SEQ ID NO: 786 - RNA, 17 nt, artificial sequence
  misc_feature: oligonucleotide substrate
uucaugaaguuggccga

SEQ ID NO: 787 - RNA, 17 nt, artificial sequence
  misc_feature: oligonucleotide substrate
ugaaguuggccgaauug

SEQ ID NO: 788 - RNA, 17 nt, artificial sequence
  misc_feature: oligonucleotide substrate
uuggccgaauugaaagg

SEQ ID NO: 789 - RNA, 17 nt, artificial sequence
  misc_feature: oligonucleotide substrate
auugaaagguacguccg

SEQ ID NO: 790 - RNA, 17 nt, artificial sequence
  misc_feature: oligonucleotide substrate
ugaaagguacguccguc

SEQ ID NO: 791 - RNA, 17 nt, artificial sequence
  misc_feature: oligonucleotide substrate
aaagguacguccgucua

SEQ ID NO: 792 - RNA, 17 nt, artificial sequence
  misc_feature: oligonucleotide substrate
guacguccgucuaugac

SEQ ID NO: 793 - RNA, 17 nt, artificial sequence
  misc_feature: oligonucleotide substrate
guccgucuaugaccacc

SEQ ID NO: 794 - RNA, 17 nt, artificial sequence
  misc_feature: oligonucleotide substrate
cgucuaugaccaccuca

SEQ ID NO: 795 - RNA, 17 nt, artificial sequence
  misc_feature: oligonucleotide substrate
cuaugaccaccucacuc

SEQ ID NO: 796 - RNA, 17 nt, artificial sequence
  misc_feature: oligonucleotide substrate
accaccucacuccacug

SEQ ID NO: 797 - RNA, 17 nt, artificial sequence
  misc_feature: oligonucleotide substrate
cucacuccacugcagga

SEQ ID NO: 798 - RNA, 17 nt, artificial sequence
  misc_feature: oligonucleotide substrate
acuccacugcaggacug

SEQ ID NO: 799 - RNA, 17 nt, artificial sequence
  misc_feature: oligonucleotide substrate
acugcaggacugggccc

SEQ ID NO: 800 - RNA, 17 nt, artificial sequence
  misc_feature: oligonucleotide substrate
aggacugggcccacaca

SEQ ID NO: 801 - RNA, 17 nt, artificial sequence
  misc_feature: oligonucleotide substrate
cugggcccacacagguc

SEQ ID NO: 802 - RNA, 17 nt, artificial sequence
  misc_feature: oligonucleotide substrate
gggcccacacaggucua

SEQ ID NO: 803 - RNA, 17 nt, artificial sequence
  misc_feature: oligonucleotide substrate
ccacacaggucuacgag

SEQ ID NO: 804 - RNA, 17 nt, artificial sequence
  misc_feature: oligonucleotide substrate
acaggucuacgagaccu

SEQ ID NO: 805 - RNA, 17 nt, artificial sequence
  misc_feature: oligonucleotide substrate
ucuacgagaccuggcgg

SEQ ID NO: 806 - RNA, 17 nt, artificial sequence
  misc_feature: oligonucleotide substrate
gagaccuggcgguagcg

SEQ ID NO: 807 - RNA, 17 nt, artificial sequence
  misc_feature: oligonucleotide substrate
accuggcgguagcgguc

SEQ ID NO: 808 - RNA, 17 nt, artificial sequence
  misc_feature: oligonucleotide substrate
uggcgguagcggucgag

SEQ ID NO: 809 - RNA, 17 nt, artificial sequence
  misc_feature: oligonucleotide substrate
cgguagcggucgagccc

SEQ ID NO: 810 - RNA, 17 nt, artificial sequence
  misc_feature: oligonucleotide substrate
gcggucgagcccgucgu

SEQ ID NO: 811 - RNA, 17 nt, artificial sequence
  misc_feature: oligonucleotide substrate
ucgagcccgucgucuuc

SEQ ID NO: 812 - RNA, 17 nt, artificial sequence
  misc_feature: oligonucleotide substrate
agcccgucgucuucucc

SEQ ID NO: 813 - RNA, 17 nt, artificial sequence
  misc_feature: oligonucleotide substrate
cuucuccgacauggaaa

SEQ ID NO: 814 - RNA, 17 nt, artificial sequence
  misc_feature: oligonucleotide substrate
ucuccgacauggaaauc

SEQ ID NO: 815 - RNA, 17 nt, artificial sequence
  misc_feature: oligonucleotide substrate
acauggaaaucaagauc

SEQ ID NO: 816 - RNA, 17 nt, artificial sequence
  misc_feature: oligonucleotide substrate
aaaucaagaucaucacc

SEQ ID NO: 817 - RNA, 17 nt, artificial sequence
  misc_feature: oligonucleotide substrate
ucaagaucaucaccugg

SEQ ID NO: 818 - RNA, 17 nt, artificial sequence
  misc_feature: oligonucleotide substrate
agaucaucaccuggggg

SEQ ID NO: 819 - RNA, 17 nt, artificial sequence
  misc_feature: oligonucleotide substrate
ggggggagacaccgcgg

SEQ ID NO: 820 - RNA, 17 nt, artificial sequence
  misc_feature: oligonucleotide substrate
ggggagacaccgcggcg

SEQ ID NO: 821 - RNA, 17 nt, artificial sequence
  misc_feature: oligonucleotide substrate
gagacaccgcggcgugu

SEQ ID NO: 822 - RNA, 17 nt, artificial sequence
  misc_feature: oligonucleotide substrate
acaccgcggcguguggg

SEQ ID NO: 823 - RNA, 17 nt, artificial sequence
  misc_feature: oligonucleotide substrate
accgcggcgugugggga

SEQ ID NO: 824 - RNA, 17 nt, artificial sequence
  misc_feature: oligonucleotide substrate
cgcggcguguggggaca

SEQ ID NO: 825 - RNA, 17 nt, artificial sequence
  misc_feature: oligonucleotide substrate
guguggggacaucauua

SEQ ID NO: 826 - RNA, 17 nt, artificial sequence
  misc_feature: oligonucleotide substrate
guggggacaucauuaug

SEQ ID NO: 827 - RNA, 17 nt, artificial sequence
  misc_feature: oligonucleotide substrate
gggacaucauuaugggu

SEQ ID NO: 828 - RNA, 17 nt, artificial sequence
  misc_feature: oligonucleotide substrate
acaucauuaugggucua

SEQ ID NO: 829 - RNA, 17 nt, artificial sequence
  misc_feature: oligonucleotide substrate
cauuaugggucuaccug

SEQ ID NO: 830 - RNA, 17 nt, artificial sequence
  misc_feature: oligonucleotide substrate
augggucuaccugucuc

SEQ ID NO: 831 - RNA, 17 nt, artificial sequence
  misc_feature: oligonucleotide substrate
gucuaccugucuccgcc

SEQ ID NO: 832 - RNA, 17 nt, artificial sequence
  misc_feature: oligonucleotide substrate
cugucuccgcccgaagg

SEQ ID NO: 833 - RNA, 17 nt, artificial sequence
  misc_feature: oligonucleotide substrate
ggagggagauacuccua

SEQ ID NO: 834 - RNA, 17 nt, artificial sequence
  misc_feature: oligonucleotide substrate
agggagauacuccuagg

SEQ ID NO: 835 - RNA, 17 nt, artificial sequence
  misc_feature: oligonucleotide substrate
cuccuaggaccagccga

SEQ ID NO: 836 - RNA, 17 nt, artificial sequence
  misc_feature: oligonucleotide substrate
uaggaccagccgacagu

SEQ ID NO: 837 - RNA, 17 nt, artificial sequence
  misc_feature: oligonucleotide substrate
accagccgacagucuug

SEQ ID NO: 838 - RNA, 17 nt, artificial sequence
  misc_feature: oligonucleotide substrate
agccgacagucuugagg

SEQ ID NO: 839 - RNA, 17 nt, artificial sequence
  misc_feature: oligonucleotide substrate
cuugaggggcaggggug

SEQ ID NO: 840 - RNA, 17 nt, artificial sequence
  misc_feature: oligonucleotide substrate
gggcagggguggcgacu

SEQ ID NO: 841 - RNA, 17 nt, artificial sequence
  misc_feature: oligonucleotide substrate
cagggguggcgacuccu

SEQ ID NO: 842 - RNA, 17 nt, artificial sequence
  misc_feature: oligonucleotide substrate
ggguggcgacuccucgc

SEQ ID NO: 843 - RNA, 17 nt, artificial sequence
  misc_feature: oligonucleotide substrate
gacuccucgcgcccauu

SEQ ID NO: 844 - RNA, 17 nt, artificial sequence
  misc_feature: oligonucleotide substrate
cuccucgcgcccauuac

SEQ ID NO: 845 - RNA, 17 nt, artificial sequence
  misc_feature: oligonucleotide substrate
ucgcgcccauuacggcc

SEQ ID NO: 846 - RNA, 17 nt, artificial sequence
  misc_feature: oligonucleotide substrate
cgcccauuacggccuac

SEQ ID NO: 847 - RNA, 17 nt, artificial sequence
  misc_feature: oligonucleotide substrate
ccauuacggccuacucc

SEQ ID NO: 848 - RNA, 17 nt, artificial sequence
  misc_feature: oligonucleotide substrate
uacggccuacucccaac

SEQ ID NO: 849 - RNA, 17 nt, artificial sequence
  misc_feature: oligonucleotide substrate
uacucccaacagacgcg

SEQ ID NO: 850 - RNA, 17 nt, artificial sequence
  misc_feature: oligonucleotide substrate
cccaacagacgcggggc

SEQ ID NO: 851 - RNA, 17 nt, artificial sequence
  misc_feature: oligonucleotide substrate
caacagacgcggggccu

SEQ ID NO: 852 - RNA, 17 nt, artificial sequence
  misc_feature: oligonucleotide substrate
gacgcggggccuguuug

SEQ ID NO: 853 - RNA, 17 nt, artificial sequence
  misc_feature: oligonucleotide substrate
cggggccuguuuggcug

SEQ ID NO: 854 - RNA, 17 nt, artificial sequence
  misc_feature: oligonucleotide substrate
ccuguuuggcugcauua

SEQ ID NO: 855 - RNA, 17 nt, artificial sequence
  misc_feature: oligonucleotide substrate
guuuggcugcauuauca

SEQ ID NO: 856 - RNA, 17 nt, artificial sequence
  misc_feature: oligonucleotide substrate
uuggcugcauuaucacc

SEQ ID NO: 857 - RNA, 17 nt, artificial sequence
  misc_feature: oligonucleotide substrate
gcugcauuaucaccagc

SEQ ID NO: 858 - RNA, 17 nt, artificial sequence
  misc_feature: oligonucleotide substrate
gcauuaucaccagccuc

SEQ ID NO: 859 - RNA, 17 nt, artificial sequence
  misc_feature: oligonucleotide substrate
uaucaccagccucacgg

SEQ ID NO: 860 - RNA, 17 nt, artificial sequence
  misc_feature: oligonucleotide substrate
ccagccucacgggccgg

SEQ ID NO: 861 - RNA, 17 nt, artificial sequence
  misc_feature: oligonucleotide substrate
ccucacgggccgggaca

SEQ ID NO: 862 - RNA, 17 nt, artificial sequence
  misc_feature: oligonucleotide substrate
gggccgggacaagaacc

SEQ ID NO: 863 - RNA, 17 nt, artificial sequence
  misc_feature: oligonucleotide substrate
ggacaagaaccaagucg

SEQ ID NO: 864 - RNA, 17 nt, artificial sequence
  misc_feature: oligonucleotide substrate
agaaccaagucgagggg

SEQ ID NO: 865 - RNA, 17 nt, artificial sequence
  misc_feature: oligonucleotide substrate
agggggaaguucaagug

SEQ ID NO: 866 - RNA, 17 nt, artificial sequence
  misc_feature: oligonucleotide substrate
aaguucaagugguuucc

SEQ ID NO: 867 - RNA, 17 nt, artificial sequence
  misc_feature: oligonucleotide substrate
uucaagugguuuccacc

SEQ ID NO: 868 - RNA, 17 nt, artificial sequence
  misc_feature: oligonucleotide substrate
ugguuuccaccgcgacg

SEQ ID NO: 869 - RNA, 17 nt, artificial sequence
  misc_feature: oligonucleotide substrate
uuuccaccgcgacgcag

SEQ ID NO: 870 - RNA, 17 nt, artificial sequence
  misc_feature: oligonucleotide substrate
ccaccgcgacgcagucu

SEQ ID NO: 871 - RNA, 17 nt, artificial sequence
  misc_feature: oligonucleotide substrate
accgcgacgcagucuuu

SEQ ID NO: 872 - RNA, 17 nt, artificial sequence
  misc_feature: oligonucleotide substrate
gcgacgcagucuuuccu

SEQ ID NO: 873 - RNA, 17 nt, artificial sequence
  misc_feature: oligonucleotide substrate
cuuuccuagcgaccugc

SEQ ID NO: 874 - RNA, 17 nt, artificial sequence
  misc_feature: oligonucleotide substrate
uccuagcgaccugcguc

SEQ ID NO: 875 - RNA, 17 nt, artificial sequence
  misc_feature: oligonucleotide substrate
agcgaccugcgucaacg

SEQ ID NO: 876 - RNA, 17 nt, artificial sequence
  misc_feature: oligonucleotide substrate
cgaccugcgucaacggc

SEQ ID NO: 877 - RNA, 17 nt, artificial sequence
  misc_feature: oligonucleotide substrate
cugcgucaacggcgugu

SEQ ID NO: 878 - RNA, 17 nt, artificial sequence
  misc_feature: oligonucleotide substrate
cgucaacggcgugugcu

SEQ ID NO: 879 - RNA, 17 nt, artificial sequence
  misc_feature: oligonucleotide substrate
ucaacggcgugugcugg

SEQ ID NO: 880 - RNA, 17 nt, artificial sequence
  misc_feature: oligonucleotide substrate
aacggcgugugcuggac

SEQ ID NO: 881 - RNA, 17 nt, artificial sequence
  misc_feature: oligonucleotide substrate
cggcgugugcuggacug

SEQ ID NO: 882 - RNA, 17 nt, artificial sequence
  misc_feature: oligonucleotide substrate
ugugcuggacugucuac

SEQ ID NO: 883 - RNA, 17 nt, artificial sequence
  misc_feature: oligonucleotide substrate
gcuggacugucuaccac

SEQ ID NO: 884 - RNA, 17 nt, artificial sequence
  misc_feature: oligonucleotide substrate
gacugucuaccacggcg

SEQ ID NO: 885 - RNA, 17 nt, artificial sequence
  misc_feature: oligonucleotide substrate
ugucuaccacggcgccg

SEQ ID NO: 886 - RNA, 17 nt, artificial sequence
  misc_feature: oligonucleotide substrate
cuaccacggcgccggcu

SEQ ID NO: 887 - RNA, 17 nt, artificial sequence
  misc_feature: oligonucleotide substrate
accacggcgccggcuca

SEQ ID NO: 888 - RNA, 17 nt, artificial sequence
  misc_feature: oligonucleotide substrate
cggcgccggcucaaaga

SEQ ID NO: 889 - RNA, 17 nt, artificial sequence
  misc_feature: oligonucleotide substrate
gcucaaagacccuagcc

SEQ ID NO: 890 - RNA, 17 nt, artificial sequence
  misc_feature: oligonucleotide substrate
agacccuagccggccca

SEQ ID NO: 891 - RNA, 17 nt, artificial sequence
  misc_feature: oligonucleotide substrate
ccuagccggcccaaagg

SEQ ID NO: 892 - RNA, 17 nt, artificial sequence
  misc_feature: oligonucleotide substrate
cccaaaggguccaauca

SEQ ID NO: 893 - RNA, 17 nt, artificial sequence
  misc_feature: oligonucleotide substrate
aggguccaaucacccaa

SEQ ID NO: 894 - RNA, 17 nt, artificial sequence
  misc_feature: oligonucleotide substrate
guccaaucacccaaaug

SEQ ID NO: 895 - RNA, 17 nt, artificial sequence
  misc_feature: oligonucleotide substrate
ucacccaaauguacacc

SEQ ID NO: 896 - RNA, 17 nt, artificial sequence
  misc_feature: oligonucleotide substrate
acccaaauguacaccaa

SEQ ID NO: 897 - RNA, 17 nt, artificial sequence
  misc_feature: oligonucleotide substrate
ccaaauguacaccaaug

SEQ ID NO: 898 - RNA, 17 nt, artificial sequence
  misc_feature: oligonucleotide substrate
aaauguacaccaaugua

SEQ ID NO: 899 - RNA, 17 nt, artificial sequence
  misc_feature: oligonucleotide substrate
guacaccaauguagacc

SEQ ID NO: 900 - RNA, 17 nt, artificial sequence
  misc_feature: oligonucleotide substrate
acaccaauguagaccag

SEQ ID NO: 901 - RNA, 17 nt, artificial sequence
  misc_feature: oligonucleotide substrate
caauguagaccaggacc

SEQ ID NO: 902 - RNA, 17 nt, artificial sequence
  misc_feature: oligonucleotide substrate
agaccaggaccucgucg

SEQ ID NO: 903 - RNA, 17 nt, artificial sequence
  misc_feature: oligonucleotide substrate
aggaccucgucggaugg

SEQ ID NO: 904 - RNA, 17 nt, artificial sequence
  misc_feature: oligonucleotide substrate
cucgucggauggccggc

SEQ ID NO: 905 - RNA, 17 nt, artificial sequence
  misc_feature: oligonucleotide substrate
gucggauggccggcgcc

SEQ ID NO: 906 - RNA, 17 nt, artificial sequence
  misc_feature: oligonucleotide substrate
gauggccggcgcccccc

SEQ ID NO: 907 - RNA, 17 nt, artificial sequence
  misc_feature: oligonucleotide substrate
uggccggcgccccccgg

SEQ ID NO: 908 - RNA, 17 nt, artificial sequence
  misc_feature: oligonucleotide substrate
cccccggagcgcggucc

SEQ ID NO: 909 - RNA, 17 nt, artificial sequence
  misc_feature: oligonucleotide substrate
cccggagcgcgguccuu

SEQ ID NO: 910 - RNA, 17 nt, artificial sequence
  misc_feature: oligonucleotide substrate
ggagcgcgguccuugac

SEQ ID NO: 911 - RNA, 17 nt, artificial sequence
  misc_feature: oligonucleotide substrate
gguccuugacaccaugc

SEQ ID NO: 912 - RNA, 17 nt, artificial sequence
  misc_feature: oligonucleotide substrate
uccuugacaccaugcac

SEQ ID NO: 913 - RNA, 17 nt, artificial sequence
  misc_feature: oligonucleotide substrate
uugacaccaugcaccug

SEQ ID NO: 914 - RNA, 17 nt, artificial sequence
  misc_feature: oligonucleotide substrate
gacaccaugcaccugcg

SEQ ID NO: 915 - RNA, 17 nt, artificial sequence
  misc_feature: oligonucleotide substrate
caccaugcaccugcggc

SEQ ID NO: 916 - RNA, 17 nt, artificial sequence
  misc_feature: oligonucleotide substrate
augcaccugcggcggcu

SEQ ID NO: 917 - RNA, 17 nt, artificial sequence
  misc_feature: oligonucleotide substrate
caccugcggcggcucgg

SEQ ID NO: 918 - RNA, 17 nt, artificial sequence
  misc_feature: oligonucleotide substrate
cugcggcggcucggacc

SEQ ID NO: 919 - RNA, 17 nt, artificial sequence
  misc_feature: oligonucleotide substrate
cggcucggaccuuuacu

SEQ ID NO: 920 - RNA, 17 nt, artificial sequence
  misc_feature: oligonucleotide substrate
ggaccuuuacuugguca

SEQ ID NO: 921 - RNA, 17 nt, artificial sequence
  misc_feature: oligonucleotide substrate
uuuacuuggucacgaga

SEQ ID NO: 922 - RNA, 17 nt, artificial sequence
  misc_feature: oligonucleotide substrate
acuuggucacgagacac

SEQ ID NO: 923 - RNA, 17 nt, artificial sequence
  misc_feature: oligonucleotide substrate
gucacgagacacgcuga

SEQ ID NO: 924 - RNA, 17 nt, artificial sequence
  misc_feature: oligonucleotide substrate
cacgagacacgcugaug

SEQ ID NO: 925 - RNA, 17 nt, artificial sequence
  misc_feature: oligonucleotide substrate
cgagacacgcugauguc

SEQ ID NO: 926 - RNA, 17 nt, artificial sequence
  misc_feature: oligonucleotide substrate
acacgcugaugucauuc

SEQ ID NO: 927 - RNA, 17 nt, artificial sequence
  misc_feature: oligonucleotide substrate
acgcugaugucauuccg

SEQ ID NO: 928 - RNA, 17 nt, artificial sequence
  misc_feature: oligonucleotide substrate
cugaugucauuccggug

SEQ ID NO: 929 - RNA, 17 nt, artificial sequence
  misc_feature: oligonucleotide substrate
ucauuccggugcgccgg

SEQ ID NO: 930 - RNA, 17 nt, artificial sequence
  misc_feature: oligonucleotide substrate
auuccggugcgccggcg

SEQ ID NO: 931 - RNA, 17 nt, artificial sequence
  misc_feature: oligonucleotide substrate
uccggugcgccggcggg

SEQ ID NO: 932 - RNA, 17 nt, artificial sequence
  misc_feature: oligonucleotide substrate
gugcgccggcgggguga

SEQ ID NO: 933 - RNA, 17 nt, artificial sequence
  misc_feature: oligonucleotide substrate
ccggcggggugacagca

SEQ ID NO: 934 - RNA, 17 nt, artificial sequence
  misc_feature: oligonucleotide substrate
gcggggugacagcaggg

SEQ ID NO: 935 - RNA, 17 nt, artificial sequence
  misc_feature: oligonucleotide substrate
gggugacagcaggggga

SEQ ID NO: 936 - RNA, 17 nt, artificial sequence
  misc_feature: oligonucleotide substrate
cagggggagcuuacuau

SEQ ID NO: 937 - RNA, 17 nt, artificial sequence
  misc_feature: oligonucleotide substrate
gggagcuuacuaucccc

SEQ ID NO: 938 - RNA, 17 nt, artificial sequence
  misc_feature: oligonucleotide substrate
agcuuacuaucccccag

SEQ ID NO: 939 - RNA, 17 nt, artificial sequence
  misc_feature: oligonucleotide substrate
ucccccaggcccaucuc

SEQ ID NO: 940 - RNA, 17 nt, artificial sequence
  misc_feature: oligonucleotide substrate
ccaggcccaucuccuac

SEQ ID NO: 941 - RNA, 17 nt, artificial sequence
  misc_feature: oligonucleotide substrate
caucuccuacuugaagg

SEQ ID NO: 942 - RNA, 17 nt, artificial sequence
  misc_feature: oligonucleotide substrate
cuugaagggcuccucgg

SEQ ID NO: 943 - RNA, 17 nt, artificial sequence
  misc_feature: oligonucleotide substrate
cuccucgggcgguccac

SEQ ID NO: 944 - RNA, 17 nt, artificial sequence
  misc_feature: oligonucleotide substrate
cucgggcgguccacugc

SEQ ID NO: 945 - RNA, 17 nt, artificial sequence
  misc_feature: oligonucleotide substrate
ggcgguccacugcucug

SEQ ID NO: 946 - RNA, 17 nt, artificial sequence
  misc_feature: oligonucleotide substrate
gguccacugcucugccc

SEQ ID NO: 947 - RNA, 17 nt, artificial sequence
  misc_feature: oligonucleotide substrate
acugcucugcccuucgg

SEQ ID NO: 948 - RNA, 17 nt, artificial sequence
  misc_feature: oligonucleotide substrate
ccuucggggcacguugu

SEQ ID NO: 949 - RNA, 17 nt, artificial sequence
  misc_feature: oligonucleotide substrate
uucggggcacguugugg

SEQ ID NO: 950 - RNA, 17 nt, artificial sequence
  misc_feature: oligonucleotide substrate
cggggcacguugugggc

SEQ ID NO: 951 - RNA, 17 nt, artificial sequence
  misc_feature: oligonucleotide substrate
ggcacguugugggcauc

SEQ ID NO: 952 - RNA, 17 nt, artificial sequence
  misc_feature: oligonucleotide substrate
cguugugggcaucuucc

SEQ ID NO: 953 - RNA, 17 nt, artificial sequence
  misc_feature: oligonucleotide substrate
uugugggcaucuuccgg

SEQ ID NO: 954 - RNA, 17 nt, artificial sequence
  misc_feature: oligonucleotide substrate
ucuuccgggcugcugug

SEQ ID NO: 955 - RNA, 17 nt, artificial sequence
  misc_feature: oligonucleotide substrate
uccgggcugcugugugc

SEQ ID NO: 956 - RNA, 17 nt, artificial sequence
  misc_feature: oligonucleotide substrate
gggcugcugugugcacc

SEQ ID NO: 957 - RNA, 17 nt, artificial sequence
  misc_feature: oligonucleotide substrate
gcugcugugugcacccg

SEQ ID NO: 958 - RNA, 17 nt, artificial sequence
  misc_feature: oligonucleotide substrate
ugcugugugcacccggg

SEQ ID NO: 959 - RNA, 17 nt, artificial sequence
  misc_feature: oligonucleotide substrate
cugugugcacccggggg

SEQ ID NO: 960 - RNA, 17 nt, artificial sequence
  misc_feature: oligonucleotide substrate
cccgggggguugcgaag

SEQ ID NO: 961 - RNA, 17 nt, artificial sequence
  misc_feature: oligonucleotide substrate
gggggguugcgaaggcg

SEQ ID NO: 962 - RNA, 17 nt, artificial sequence
  misc_feature: oligonucleotide substrate
uugcgaaggcgguggac

SEQ ID NO: 963 - RNA, 17 nt, artificial sequence
  misc_feature: oligonucleotide substrate
cgaaggcgguggacuuu

SEQ ID NO: 964 - RNA, 17 nt, artificial sequence
  misc_feature: oligonucleotide substrate
ggcgguggacuuuguac

SEQ ID NO: 965 - RNA, 17 nt, artificial sequence
  misc_feature: oligonucleotide substrate
uggacuuuguacccguu

SEQ ID NO: 966 - RNA, 17 nt, artificial sequence
  misc_feature: oligonucleotide substrate
gacuuuguacccguuga

SEQ ID NO: 967 - RNA, 17 nt, artificial sequence
  misc_feature: oligonucleotide substrate
uuguacccguugagucu

SEQ ID NO: 968 - RNA, 17 nt, artificial sequence
  misc_feature: oligonucleotide substrate
cccguugagucuaugga

SEQ ID NO: 969 - RNA, 17 nt, artificial sequence
  misc_feature: oligonucleotide substrate
uugagucuauggaaacu

SEQ ID NO: 970 - RNA, 17 nt, artificial sequence
  misc_feature: oligonucleotide substrate
cuauggaaacuaccaug

SEQ ID NO: 971 - RNA, 17 nt, artificial sequence
  misc_feature: oligonucleotide substrate
uggaaacuaccaugcgg

SEQ ID NO: 972 - RNA, 17 nt, artificial sequence
  misc_feature: oligonucleotide substrate
aaacuaccaugcggucc

SEQ ID NO: 973 - RNA, 17 nt, artificial sequence
  misc_feature: oligonucleotide substrate
acuaccaugcggucccc

SEQ ID NO: 974 - RNA, 17 nt, artificial sequence
  misc_feature: oligonucleotide substrate
accaugcgguccccggu

SEQ ID NO: 975 - RNA, 17 nt, artificial sequence
  misc_feature: oligonucleotide substrate
gguccccggucuucacg

SEQ ID NO: 976 - RNA, 17 nt, artificial sequence
  misc_feature: oligonucleotide substrate
cggucuucacggacaac

SEQ ID NO: 977 - RNA, 17 nt, artificial sequence
  misc_feature: oligonucleotide substrate
cuucacggacaacucgu

SEQ ID NO: 978 - RNA, 17 nt, artificial sequence
  misc_feature: oligonucleotide substrate
cacggacaacucguccc

SEQ ID NO: 979 - RNA, 17 nt, artificial sequence
  misc_feature: oligonucleotide substrate
gacaacucguccccccc

SEQ ID NO: 980 - RNA, 17 nt, artificial sequence
  misc_feature: oligonucleotide substrate
cccccccagccguaccg

SEQ ID NO: 981 - RNA, 17 nt, artificial sequence
  misc_feature: oligonucleotide substrate
ccccagccguaccgcag

SEQ ID NO: 982 - RNA, 17 nt, artificial sequence
  misc_feature: oligonucleotide substrate
ccagccguaccgcagac

SEQ ID NO: 983 - RNA, 17 nt, artificial sequence
  misc_feature: oligonucleotide substrate
gccguaccgcagacauu

SEQ ID NO: 984 - RNA, 17 nt, artificial sequence
  misc_feature: oligonucleotide substrate
uaccgcagacauuccaa

SEQ ID NO: 985 - RNA, 17 nt, artificial sequence
  misc_feature: oligonucleotide substrate
ccgcagacauuccaagu

SEQ ID NO: 986 - RNA, 17 nt, artificial sequence
  misc_feature: oligonucleotide substrate
cauuccaaguggcccac

SEQ ID NO: 987 - RNA, 17 nt, artificial sequence
  misc_feature: oligonucleotide substrate
uccaaguggcccaccua

SEQ ID NO: 988 - RNA, 17 nt, artificial sequence
  misc_feature: oligonucleotide substrate
aguggcccaccuacacg

SEQ ID NO: 989 - RNA, 17 nt, artificial sequence
  misc_feature: oligonucleotide substrate
gcccaccuacacgcucc

SEQ ID NO: 990 - RNA, 17 nt, artificial sequence
  misc_feature: oligonucleotide substrate
ccaccuacacgcuccca

SEQ ID NO: 991 - RNA, 17 nt, artificial sequence
  misc_feature: oligonucleotide substrate
accuacacgcucccacu

SEQ ID NO: 992 - RNA, 17 nt, artificial sequence
  misc_feature: oligonucleotide substrate
acgcucccacuggcagc

SEQ ID NO: 993 - RNA, 17 nt, artificial sequence
  misc_feature: oligonucleotide substrate
ucccacuggcagcggca

SEQ ID NO: 994 - RNA, 17 nt, artificial sequence
  misc_feature: oligonucleotide substrate
cacuggcagcggcaaga

SEQ ID NO: 995 - RNA, 17 nt, artificial sequence
  misc_feature: oligonucleotide substrate
uggcagcggcaagagca

SEQ ID NO: 996 - RNA, 17 nt, artificial sequence
  misc_feature: oligonucleotide substrate
cggcaagagcacuaagg

SEQ ID NO: 997 - RNA, 17 nt, artificial sequence
  misc_feature: oligonucleotide substrate
gcaagagcacuaaggua

SEQ ID NO: 998 - RNA, 17 nt, artificial sequence
  misc_feature: oligonucleotide substrate
gcacuaagguaccggcu

SEQ ID NO: 999 - RNA, 17 nt, artificial sequence
  misc_feature: oligonucleotide substrate
acuaagguaccggcugc

SEQ ID NO: 1000 - RNA, 17 nt, artificial sequence
  misc_feature: oligonucleotide substrate
agguaccggcugcauau

SEQ ID NO: 1001 - RNA, 17 nt, artificial sequence
  misc_feature: oligonucleotide substrate
uaccggcugcauaugca

SEQ ID NO: 1002 - RNA, 17 nt, artificial sequence
  misc_feature: oligonucleotide substrate
ccggcugcauaugcagc

SEQ ID NO: 1003 - RNA, 17 nt, artificial sequence
  misc_feature: oligonucleotide substrate
ggcugcauaugcagccc

SEQ ID NO: 1004 - RNA, 17 nt, artificial sequence
  misc_feature: oligonucleotide substrate
cugcauaugcagcccaa

SEQ ID NO: 1005 - RNA, 17 nt, artificial sequence
  misc_feature: oligonucleotide substrate
cauaugcagcccaaggg

SEQ ID NO: 1006 - RNA, 17 nt, artificial sequence
  misc_feature: oligonucleotide substrate
gcccaaggguacaaagu

SEQ ID NO: 1007 - RNA, 17 nt, artificial sequence
  misc_feature: oligonucleotide substrate
ccaaggguacaaagugc

SEQ ID NO: 1008 - RNA, 17 nt, artificial sequence
  misc_feature: oligonucleotide substrate
gguacaaagugcucguc

SEQ ID NO: 1009 - RNA, 17 nt, artificial sequence
  misc_feature: oligonucleotide substrate
uacaaagugcucguccu

SEQ ID NO: 1010 - RNA, 17 nt, artificial sequence
  misc_feature: oligonucleotide substrate
aagugcucguccuaaau

SEQ ID NO: 1011 - RNA, 17 nt, artificial sequence
  misc_feature: oligonucleotide substrate
cguccuaaauccguccg

SEQ ID NO: 1012 - RNA, 17 nt, artificial sequence
  misc_feature: oligonucleotide substrate
cuaaauccguccguuac

SEQ ID NO: 1013 - RNA, 17 nt, artificial sequence
  misc_feature: oligonucleotide substrate
auccguccguuaccgcc

SEQ ID NO: 1014 - RNA, 17 nt, artificial sequence
  misc_feature: oligonucleotide substrate
cguccguuaccgccacc

SEQ ID NO: 1015 - RNA, 17 nt, artificial sequence
  misc_feature: oligonucleotide substrate
ccguuaccgccaccuua

SEQ ID NO: 1016 - RNA, 17 nt, artificial sequence
  misc_feature: oligonucleotide substrate
uuaccgccaccuuaggg

SEQ ID NO: 1017 - RNA, 17 nt, artificial sequence
  misc_feature: oligonucleotide substrate
accuuaggguuuggggc

SEQ ID NO: 1018 - RNA, 17 nt, artificial sequence
  misc_feature: oligonucleotide substrate
gguuuggggcguauaug

SEQ ID NO: 1019 - RNA, 17 nt, artificial sequence
  misc_feature: oligonucleotide substrate
uuuggggcguauauguc

SEQ ID NO: 1020 - RNA, 17 nt, artificial sequence
  misc_feature: oligonucleotide substrate
uggggcguauaugucua

SEQ ID NO: 1021 - RNA, 17 nt, artificial sequence
  misc_feature: oligonucleotide substrate
gggcguauaugucuaag

SEQ ID NO: 1022 - RNA, 17 nt, artificial sequence
  misc_feature: oligonucleotide substrate
gcguauaugucuaaggc

SEQ ID NO: 1023 - RNA, 17 nt, artificial sequence
  misc_feature: oligonucleotide substrate
ugucuaaggcacacggu

SEQ ID NO: 1024 - RNA, 17 nt, artificial sequence
  misc_feature: oligonucleotide substrate
ucuaaggcacacggugu

SEQ ID NO: 1025 - RNA, 17 nt, artificial sequence
  misc_feature: oligonucleotide substrate
uaaggcacacggugucg

SEQ ID NO: 1026 - RNA, 17 nt, artificial sequence
  misc_feature: oligonucleotide substrate
ggcacacggugucgauc

SEQ ID NO: 1027 - RNA, 17 nt, artificial sequence
  misc_feature: oligonucleotide substrate
cacacggugucgauccu

SEQ ID NO: 1028 - RNA, 17 nt, artificial sequence
  misc_feature: oligonucleotide substrate
cggugucgauccuaaca

SEQ ID NO: 1029 - RNA, 17 nt, artificial sequence
  misc_feature: oligonucleotide substrate
cgauccuaacaucagaa

SEQ ID NO: 1030 - RNA, 17 nt, artificial sequence
  misc_feature: oligonucleotide substrate
auccuaacaucagaacu

SEQ ID NO: 1031 - RNA, 17 nt, artificial sequence
  misc_feature: oligonucleotide substrate
acaucagaacuggggua

SEQ ID NO: 1032 - RNA, 17 nt, artificial sequence
  misc_feature: oligonucleotide substrate
gaacugggguaaggacc

SEQ ID NO: 1033 - RNA, 17 nt, artificial sequence
  misc_feature: oligonucleotide substrate
ggguaaggaccaucacc

SEQ ID NO: 1034 - RNA, 17 nt, artificial sequence
  misc_feature: oligonucleotide substrate
uaaggaccaucaccacg

SEQ ID NO: 1035 - RNA, 17 nt, artificial sequence
  misc_feature: oligonucleotide substrate
ggaccaucaccacgggc

SEQ ID NO: 1036 - RNA, 17 nt, artificial sequence
  misc_feature: oligonucleotide substrate
ccaucaccacgggcgcc

SEQ ID NO: 1037 - RNA, 17 nt, artificial sequence
  misc_feature: oligonucleotide substrate
caccacgggcgccccca

SEQ ID NO: 1038 - RNA, 17 nt, artificial sequence
  misc_feature: oligonucleotide substrate
ccacgggcgcccccauc

SEQ ID NO: 1039 - RNA, 17 nt, artificial sequence
  misc_feature: oligonucleotide substrate
gcgcccccaucacguac

SEQ ID NO: 1040 - RNA, 17 nt, artificial sequence
  misc_feature: oligonucleotide substrate
cccccaucacguacucc

SEQ ID NO: 1041 - RNA, 17 nt, artificial sequence
  misc_feature: oligonucleotide substrate
cccaucacguacuccac

SEQ ID NO: 1042 - RNA, 17 nt, artificial sequence
  misc_feature: oligonucleotide substrate
caucacguacuccaccu

SEQ ID NO: 1043 - RNA, 17 nt, artificial sequence
  misc_feature: oligonucleotide substrate
cguacuccaccuauggc

SEQ ID NO: 1044 - RNA, 17 nt, artificial sequence
  misc_feature: oligonucleotide substrate
cuccaccuauggcaagu

SEQ ID NO: 1045 - RNA, 17 nt, artificial sequence
  misc_feature: oligonucleotide substrate
caccuauggcaaguucc

SEQ ID NO: 1046 - RNA, 17 nt, artificial sequence
  misc_feature: oligonucleotide substrate
uauggcaaguuccuugc

SEQ ID NO: 1047 - RNA, 17 nt, artificial sequence
  misc_feature: oligonucleotide substrate
aguuccuugccgacggu

SEQ ID NO: 1048 - RNA, 17 nt, artificial sequence
  misc_feature: oligonucleotide substrate
ccuugccgacggugguu

SEQ ID NO: 1049 - RNA, 17 nt, artificial sequence
  misc_feature: oligonucleotide substrate
ugccgacggugguugcu

SEQ ID NO: 1050 - RNA, 17 nt, artificial sequence
  misc_feature: oligonucleotide substrate
cgacggugguugcucug

SEQ ID NO: 1051 - RNA, 17 nt, artificial sequence
  misc_feature: oligonucleotide substrate
cggugguugcucugggg

SEQ ID NO: 1052 - RNA, 17 nt, artificial sequence
  misc_feature: oligonucleotide substrate
cucugggggcgccuaug

SEQ ID NO: 1053 - RNA, 17 nt, artificial sequence
  misc_feature: oligonucleotide substrate
cugggggcgccuaugac

SEQ ID NO: 1054 - RNA, 17 nt, artificial sequence
  misc_feature: oligonucleotide substrate
gggcgccuaugacauca

SEQ ID NO: 1055 - RNA, 17 nt, artificial sequence
  misc_feature: oligonucleotide substrate
cgccuaugacaucauaa

SEQ ID NO: 1056 - RNA, 17 nt, artificial sequence
  misc_feature: oligonucleotide substrate
ccuaugacaucauaaug

SEQ ID NO: 1057 - RNA, 17 nt, artificial sequence
  misc_feature: oligonucleotide substrate
augacaucauaaugugu

SEQ ID NO: 1058 - RNA, 17 nt, artificial sequence
  misc_feature: oligonucleotide substrate
acaucauaaugugugau

SEQ ID NO: 1059 - RNA, 17 nt, artificial sequence
  misc_feature: oligonucleotide substrate
aucauaaugugugauga

SEQ ID NO: 1060 - RNA, 17 nt, artificial sequence
  misc_feature: oligonucleotide substrate
cauaaugugugaugagu

SEQ ID NO: 1061 - RNA, 17 nt, artificial sequence
  misc_feature: oligonucleotide substrate
aaugugugaugagugcc

SEQ ID NO: 1062 - RNA, 17 nt, artificial sequence
  misc_feature: oligonucleotide substrate
ugugaugagugccacuc

SEQ ID NO: 1063 - RNA, 17 nt, artificial sequence
  misc_feature: oligonucleotide substrate
ugaugagugccacucaa

SEQ ID NO: 1064 - RNA, 17 nt, artificial sequence
  misc_feature: oligonucleotide substrate
ugagugccacucaauug

SEQ ID NO: 1065 - RNA, 17 nt, artificial sequence
  misc_feature: oligonucleotide substrate
gccacucaauugacucg

SEQ ID NO: 1066 - RNA, 17 nt, artificial sequence
  misc_feature: oligonucleotide substrate
cucaauugacucgacuu

SEQ ID NO: 1067 - RNA, 17 nt, artificial sequence
  misc_feature: oligonucleotide substrate
uugacucgacuuccauu

SEQ ID NO: 1068 - RNA, 17 nt, artificial sequence
  misc_feature: oligonucleotide substrate
cgacuuccauuuugggc

SEQ ID NO: 1069 - RNA, 17 nt, artificial sequence
  misc_feature: oligonucleotide substrate
cauuuugggcaucggca

SEQ ID NO: 1070 - RNA, 17 nt, artificial sequence
  misc_feature: oligonucleotide substrate
uuuugggcaucggcaca

SEQ ID NO: 1071 - RNA, 17 nt, artificial sequence
  misc_feature: oligonucleotide substrate
gggcaucggcacagucc

SEQ ID NO: 1072 - RNA, 17 nt, artificial sequence
  misc_feature: oligonucleotide substrate
gcaucggcacaguccug

SEQ ID NO: 1073 - RNA, 17 nt, artificial sequence
  misc_feature: oligonucleotide substrate
ucggcacaguccuggac

SEQ ID NO: 1074 - RNA, 17 nt, artificial sequence
  misc_feature: oligonucleotide substrate
aguccuggaccaagcgg

SEQ ID NO: 1075 - RNA, 17 nt, artificial sequence
  misc_feature: oligonucleotide substrate
uggaccaagcggagacg

SEQ ID NO: 1076 - RNA, 17 nt, artificial sequence
  misc_feature: oligonucleotide substrate
aagcggagacggcugga

SEQ ID NO: 1077 - RNA, 17 nt, artificial sequence
  misc_feature: oligonucleotide substrate
cggagacggcuggagcg

SEQ ID NO: 1078 - RNA, 17 nt, artificial sequence
  misc_feature: oligonucleotide substrate
cggcuggagcgcggcuc

SEQ ID NO: 1079 - RNA, 17 nt, artificial sequence
  misc_feature: oligonucleotide substrate
gcuggagcgcggcucgu

SEQ ID NO: 1080 - RNA, 17 nt, artificial sequence
  misc_feature: oligonucleotide substrate
ggagcgcggcucgucgu

SEQ ID NO: 1081 - RNA, 17 nt, artificial sequence
  misc_feature: oligonucleotide substrate
cgcggcucgucgugcuc

SEQ ID NO: 1082 - RNA, 17 nt, artificial sequence
  misc_feature: oligonucleotide substrate
ggcucgucgugcucgcc

SEQ ID NO: 1083 - RNA, 17 nt, artificial sequence
  misc_feature: oligonucleotide substrate
cucgucgugcucgccac

SEQ ID NO: 1084 - RNA, 17 nt, artificial sequence
  misc_feature: oligonucleotide substrate
ucgugcucgccaccgcu

SEQ ID NO: 1085 - RNA, 17 nt, artificial sequence
  misc_feature: oligonucleotide substrate
ugcucgccaccgcuacg

SEQ ID NO: 1086 - RNA, 17 nt, artificial sequence
  misc_feature: oligonucleotide substrate
ucgccaccgcuacgccu

SEQ ID NO: 1087 - RNA, 17 nt, artificial sequence
  misc_feature: oligonucleotide substrate
ccaccgcuacgccuccg

SEQ ID NO: 1088 - RNA, 17 nt, artificial sequence
  misc_feature: oligonucleotide substrate
accgcuacgccuccggg

SEQ ID NO: 1089 - RNA, 17 nt, artificial sequence
  misc_feature: oligonucleotide substrate
ccuccgggaucggucac

SEQ ID NO: 1090 - RNA, 17 nt, artificial sequence
  misc_feature: oligonucleotide substrate
cgggaucggucaccgug

SEQ ID NO: 1091 - RNA, 17 nt, artificial sequence
  misc_feature: oligonucleotide substrate
gaucggucaccgugcca

SEQ ID NO: 1092 - RNA, 17 nt, artificial sequence
  misc_feature: oligonucleotide substrate
cggucaccgugccacau

SEQ ID NO: 1093 - RNA, 17 nt, artificial sequence
  misc_feature: oligonucleotide substrate
gucaccgugccacaucc

SEQ ID NO: 1094 - RNA, 17 nt, artificial sequence
  misc_feature: oligonucleotide substrate
accgugccacaucccaa

SEQ ID NO: 1095 - RNA, 17 nt, artificial sequence
  misc_feature: oligonucleotide substrate
cgugccacaucccaaca

SEQ ID NO: 1096 - RNA, 17 nt, artificial sequence
  misc_feature: oligonucleotide substrate
acaucccaacaucgagg

SEQ ID NO: 1097 - RNA, 17 nt, artificial sequence
  misc_feature: oligonucleotide substrate
aucccaacaucgaggag

SEQ ID NO: 1098 - RNA, 17 nt, artificial sequence
  misc_feature: oligonucleotide substrate
ucgaggagauagccuug

SEQ ID NO: 1099 - RNA, 17 nt, artificial sequence
  misc_feature: oligonucleotide substrate
aggagauagccuugucc

SEQ ID NO: 1100 - RNA, 17 nt, artificial sequence
  misc_feature: oligonucleotide substrate
auagccuuguccaacac

SEQ ID NO: 1101 - RNA, 17 nt, artificial sequence
  misc_feature: oligonucleotide substrate
cuuguccaacaccggag

SEQ ID NO: 1102 - RNA, 17 nt, artificial sequence
  misc_feature: oligonucleotide substrate
uguccaacaccggagag

SEQ ID NO: 1103 - RNA, 17 nt, artificial sequence
  misc_feature: oligonucleotide substrate
ccggagagauccccuuc

SEQ ID NO: 1104 - RNA, 17 nt, artificial sequence
  misc_feature: oligonucleotide substrate
ccccuucuauggcaaag

SEQ ID NO: 1105 - RNA, 17 nt, artificial sequence
  misc_feature: oligonucleotide substrate
cuucuauggcaaagcca

SEQ ID NO: 1106 - RNA, 17 nt, artificial sequence
  misc_feature: oligonucleotide substrate
auggcaaagccaucccc

SEQ ID NO: 1107 - RNA, 17 nt, artificial sequence
  misc_feature: oligonucleotide substrate
gcaaagccauccccauc

SEQ ID NO: 1108 - RNA, 17 nt, artificial sequence
  misc_feature: oligonucleotide substrate
ccauccccaucgagacc

SEQ ID NO: 1109 - RNA, 17 nt, artificial sequence
  misc_feature: oligonucleotide substrate
ccaucgagaccaucaaa

SEQ ID NO: 1110 - RNA, 17 nt, artificial sequence
  misc_feature: oligonucleotide substrate
ucgagaccaucaaaggg

SEQ ID NO: 1111 - RNA, 17 nt, artificial sequence
  misc_feature: oligonucleotide substrate
ggggggaggcaucucau

SEQ ID NO: 1112 - RNA, 17 nt, artificial sequence
  misc_feature: oligonucleotide substrate
ggggaggcaucucaucu

SEQ ID NO: 1113 - RNA, 17 nt, artificial sequence
  misc_feature: oligonucleotide substrate
ggcaucucaucuucugc

SEQ ID NO: 1114 - RNA, 17 nt, artificial sequence
  misc_feature: oligonucleotide substrate
caucuucugccauucca

SEQ ID NO: 1115 - RNA, 17 nt, artificial sequence
  misc_feature: oligonucleotide substrate
cuucugccauuccaaga

SEQ ID NO: 1116 - RNA, 17 nt, artificial sequence
  misc_feature: oligonucleotide substrate
aagaagaaaugugacga

SEQ ID NO: 1117 - RNA, 17 nt, artificial sequence
  misc_feature: oligonucleotide substrate
gaagaaaugugacgagc

SEQ ID NO: 1118 - RNA, 17 nt, artificial sequence
  misc_feature: oligonucleotide substrate
gaaaugugacgagcucg

SEQ ID NO: 1119 - RNA, 17 nt, artificial sequence
  misc_feature: oligonucleotide substrate
ugugacgagcucgcugc

SEQ ID NO: 1120 - RNA, 17 nt, artificial sequence
  misc_feature: oligonucleotide substrate
acgagcucgcugcaaag

SEQ ID NO: 1121 - RNA, 17 nt, artificial sequence
  misc_feature: oligonucleotide substrate
agcucgcugcaaagcug

SEQ ID NO: 1122 - RNA, 17 nt, artificial sequence
  misc_feature: oligonucleotide substrate
gcugcaaagcugucggg

SEQ ID NO: 1123 - RNA, 17 nt, artificial sequence
  misc_feature: oligonucleotide substrate
gcaaagcugucgggccu

SEQ ID NO: 1124 - RNA, 17 nt, artificial sequence
  misc_feature: oligonucleotide substrate
gcugucgggccucggac

SEQ ID NO: 1125 - RNA, 17 nt, artificial sequence
  misc_feature: oligonucleotide substrate
ggccucggacuuaacgc

SEQ ID NO: 1126 - RNA, 17 nt, artificial sequence
  misc_feature: oligonucleotide substrate
cggacuuaacgcuguag

SEQ ID NO: 1127 - RNA, 17 nt, artificial sequence
  misc_feature: oligonucleotide substrate
gacuuaacgcuguagcg

SEQ ID NO: 1128 - RNA, 17 nt, artificial sequence
  misc_feature: oligonucleotide substrate
uuaacgcuguagcguau

SEQ ID NO: 1129 - RNA, 17 nt, artificial sequence
  misc_feature: oligonucleotide substrate
acgcuguagcguauuac

SEQ ID NO: 1130 - RNA, 17 nt, artificial sequence
  misc_feature: oligonucleotide substrate
gcuguagcguauuaccg

SEQ ID NO: 1131 - RNA, 17 nt, artificial sequence
  misc_feature: oligonucleotide substrate
uguagcguauuaccggg

SEQ ID NO: 1132 - RNA, 17 nt, artificial sequence
  misc_feature: oligonucleotide substrate
agcguauuaccgggguc

SEQ ID NO: 1133 - RNA, 17 nt, artificial sequence
  misc_feature: oligonucleotide substrate
uuaccggggucucgacg

SEQ ID NO: 1134 - RNA, 17 nt, artificial sequence
  misc_feature: oligonucleotide substrate
gggucucgacguguccg

SEQ ID NO: 1135 - RNA, 17 nt, artificial sequence
  misc_feature: oligonucleotide substrate
gucucgacguguccguc

SEQ ID NO: 1136 - RNA, 17 nt, artificial sequence
  misc_feature: oligonucleotide substrate
cucgacguguccgucau

SEQ ID NO: 1137 - RNA, 17 nt, artificial sequence
  misc_feature: oligonucleotide substrate
acguguccgucauaccg

SEQ ID NO: 1138 - RNA, 17 nt, artificial sequence
  misc_feature: oligonucleotide substrate
uguccgucauaccggcc

SEQ ID NO: 1139 - RNA, 17 nt, artificial sequence
  misc_feature: oligonucleotide substrate
uccgucauaccggccag

SEQ ID NO: 1140 - RNA, 17 nt, artificial sequence
  misc_feature: oligonucleotide substrate
ucauaccggccagcggg

SEQ ID NO: 1141 - RNA, 17 nt, artificial sequence
  misc_feature: oligonucleotide substrate
accggccagcggggacg

SEQ ID NO: 1142 - RNA, 17 nt, artificial sequence
  misc_feature: oligonucleotide substrate
cagcggggacgucguug

SEQ ID NO: 1143 - RNA, 17 nt, artificial sequence
  misc_feature: oligonucleotide substrate
gcggggacgucguuguc

SEQ ID NO: 1144 - RNA, 17 nt, artificial sequence
  misc_feature: oligonucleotide substrate
gggacgucguugucgug

SEQ ID NO: 1145 - RNA, 17 nt, artificial sequence
  misc_feature: oligonucleotide substrate
acgucguugucguggca

SEQ ID NO: 1146 - RNA, 17 nt, artificial sequence
  misc_feature: oligonucleotide substrate
ucguugucguggcaaca

SEQ ID NO: 1147 - RNA, 17 nt, artificial sequence
  misc_feature: oligonucleotide substrate
uugucguggcaacagac

SEQ ID NO: 1148 - RNA, 17 nt, artificial sequence
  misc_feature: oligonucleotide substrate
ucguggcaacagacgcu

SEQ ID NO: 1149 - RNA, 17 nt, artificial sequence
  misc_feature: oligonucleotide substrate
ggcaacagacgcucuaa

SEQ ID NO: 1150 - RNA, 17 nt, artificial sequence
  misc_feature: oligonucleotide substrate
caacagacgcucuaaug

SEQ ID NO: 1151 - RNA, 17 nt, artificial sequence
  misc_feature: oligonucleotide substrate
acgcucuaaugacgggc

SEQ ID NO: 1152 - RNA, 17 nt, artificial sequence
  misc_feature: oligonucleotide substrate
cucuaaugacgggcuau

SEQ ID NO: 1153 - RNA, 17 nt, artificial sequence
  misc_feature: oligonucleotide substrate
aaugacgggcuauaccg

SEQ ID NO: 1154 - RNA, 17 nt, artificial sequence
  misc_feature: oligonucleotide substrate
gacgggcuauaccggcg

SEQ ID NO: 1155 - RNA, 17 nt, artificial sequence
  misc_feature: oligonucleotide substrate
cgggcuauaccggcgau

SEQ ID NO: 1156 - RNA, 17 nt, artificial sequence
  misc_feature: oligonucleotide substrate
cuauaccggcgauuuug

SEQ ID NO: 1157 - RNA, 17 nt, artificial sequence
  misc_feature: oligonucleotide substrate
uaccggcgauuuugacu

SEQ ID NO: 1158 - RNA, 17 nt, artificial sequence
  misc_feature: oligonucleotide substrate
cgauuuugacucgguga

SEQ ID NO: 1159 - RNA, 17 nt, artificial sequence
  misc_feature: oligonucleotide substrate
uugacucggugaucgac

SEQ ID NO: 1160 - RNA, 17 nt, artificial sequence
  misc_feature: oligonucleotide substrate
acucggugaucgacugu

SEQ ID NO: 1161 - RNA, 17 nt, artificial sequence
  misc_feature: oligonucleotide substrate
ggugaucgacuguaaua

SEQ ID NO: 1162 - RNA, 17 nt, artificial sequence
  misc_feature: oligonucleotide substrate
gaucgacuguaauacau

SEQ ID NO: 1163 - RNA, 17 nt, artificial sequence
  misc_feature: oligonucleotide substrate
cgacuguaauacaugug

SEQ ID NO: 1164 - RNA, 17 nt, artificial sequence
  misc_feature: oligonucleotide substrate
acuguaauacauguguc

SEQ ID NO: 1165 - RNA, 17 nt, artificial sequence
  misc_feature: oligonucleotide substrate
uguaauacaugugucac

SEQ ID NO: 1166 - RNA, 17 nt, artificial sequence
  misc_feature: oligonucleotide substrate
uaauacaugugucaccc

SEQ ID NO: 1167 - RNA, 17 nt, artificial sequence
  misc_feature: oligonucleotide substrate
auacaugugucacccaa

SEQ ID NO: 1168 - RNA, 17 nt, artificial sequence
  misc_feature: oligonucleotide substrate
caugugucacccaaaca

SEQ ID NO: 1169 - RNA, 17 nt, artificial sequence
  misc_feature: oligonucleotide substrate
ucacccaaacagucgac

SEQ ID NO: 1170 - RNA, 17 nt, artificial sequence
  misc_feature: oligonucleotide substrate
cccaaacagucgacuuc

SEQ ID NO: 1171 - RNA, 17 nt, artificial sequence
  misc_feature: oligonucleotide substrate
aacagucgacuucagcu

SEQ ID NO: 1172 - RNA, 17 nt, artificial sequence
  misc_feature: oligonucleotide substrate
cgacuucagcuuggacc

SEQ ID NO: 1173 - RNA, 17 nt, artificial sequence
  misc_feature: oligonucleotide substrate
cagcuuggacccuaccu

SEQ ID NO: 1174 - RNA, 17 nt, artificial sequence
  misc_feature: oligonucleotide substrate
uggacccuaccuucacc

SEQ ID NO: 1175 - RNA, 17 nt, artificial sequence
  misc_feature: oligonucleotide substrate
cuaccuucaccauugag

SEQ ID NO: 1176 - RNA, 17 nt, artificial sequence
  misc_feature: oligonucleotide substrate
ccuucaccauugagacg

SEQ ID NO: 1177 - RNA, 17 nt, artificial sequence
  misc_feature: oligonucleotide substrate
ccauugagacgacgacc

SEQ ID NO: 1178 - RNA, 17 nt, artificial sequence
  misc_feature: oligonucleotide substrate
uugagacgacgaccgug

SEQ ID NO: 1179 - RNA, 17 nt, artificial sequence
  misc_feature: oligonucleotide substrate
agacgacgaccgugccc

SEQ ID NO: 1180 - RNA, 17 nt, artificial sequence
  misc_feature: oligonucleotide substrate
cgacgaccgugccccaa

SEQ ID NO: 1181 - RNA, 17 nt, artificial sequence
  misc_feature: oligonucleotide substrate
acgaccgugccccaaga

SEQ ID NO: 1182 - RNA, 17 nt, artificial sequence
  misc_feature: oligonucleotide substrate
gccccaagacgcagugu

SEQ ID NO: 1183 - RNA, 17 nt, artificial sequence
  misc_feature: oligonucleotide substrate
cccaagacgcagugucc

SEQ ID NO: 1184 - RNA, 17 nt, artificial sequence
  misc_feature: oligonucleotide substrate
aagacgcagugucccgc

SEQ ID NO: 1185 - RNA, 17 nt, artificial sequence
  misc_feature: oligonucleotide substrate
gacgcagugucccgcuc

SEQ ID NO: 1186 - RNA, 17 nt, artificial sequence
  misc_feature: oligonucleotide substrate
agugucccgcucgcaga

SEQ ID NO: 1187 - RNA, 17 nt, artificial sequence
  misc_feature: oligonucleotide substrate
ucccgcucgcagaggcg

SEQ ID NO: 1188 - RNA, 17 nt, artificial sequence
  misc_feature: oligonucleotide substrate
ucgcagaggcgagguag

SEQ ID NO: 1189 - RNA, 17 nt, artificial sequence
  misc_feature: oligonucleotide substrate
gaggcgagguaggaccg

SEQ ID NO: 1190 - RNA, 17 nt, artificial sequence
  misc_feature: oligonucleotide substrate
gagguaggaccgguagg

SEQ ID NO: 1191 - RNA, 17 nt, artificial sequence
  misc_feature: oligonucleotide substrate
uaggaccgguaggggca

SEQ ID NO: 1192 - RNA, 17 nt, artificial sequence
  misc_feature: oligonucleotide substrate
cgguaggggcaggagag

SEQ ID NO: 1193 - RNA, 17 nt, artificial sequence
  misc_feature: oligonucleotide substrate
caggagaggcauauaca

SEQ ID NO: 1194 - RNA, 17 nt, artificial sequence
  misc_feature: oligonucleotide substrate
ggagaggcauauacagg

SEQ ID NO: 1195 - RNA, 17 nt, artificial sequence
  misc_feature: oligonucleotide substrate
agaggcauauacagguu

SEQ ID NO: 1196 - RNA, 17 nt, artificial sequence
  misc_feature: oligonucleotide substrate
aggcauauacagguuug

SEQ ID NO: 1197 - RNA, 17 nt, artificial sequence
  misc_feature: oligonucleotide substrate
auauacagguuugugac

SEQ ID NO: 1198 - RNA, 17 nt, artificial sequence
  misc_feature: oligonucleotide substrate
acagguuugugacucca

SEQ ID NO: 1199 - RNA, 17 nt, artificial sequence
  misc_feature: oligonucleotide substrate
gguuugugacuccagga

SEQ ID NO: 1200 - RNA, 17 nt, artificial sequence
  misc_feature: oligonucleotide substrate
ccaggagagcggccuuc

SEQ ID NO: 1201 - RNA, 17 nt, artificial sequence
  misc_feature: oligonucleotide substrate
ggagagcggccuucggg

SEQ ID NO: 1202 - RNA, 17 nt, artificial sequence
  misc_feature: oligonucleotide substrate
gccuucgggcauguucg

SEQ ID NO: 1203 - RNA, 17 nt, artificial sequence
  misc_feature: oligonucleotide substrate
cuucgggcauguucgac

SEQ ID NO: 1204 - RNA, 17 nt, artificial sequence
  misc_feature: oligonucleotide substrate
ucgggcauguucgacuc

SEQ ID NO: 1205 - RNA, 17 nt, artificial sequence
  misc_feature: oligonucleotide substrate
cauguucgacuccucgg

SEQ ID NO: 1206 - RNA, 17 nt, artificial sequence
  misc_feature: oligonucleotide substrate
acuccucgguccugugu

SEQ ID NO: 1207 - RNA, 17 nt, artificial sequence
  misc_feature: oligonucleotide substrate
ucgguccugugugagug

SEQ ID NO: 1208 - RNA, 17 nt, artificial sequence
  misc_feature: oligonucleotide substrate
gguccugugugagugcu

SEQ ID NO: 1209 - RNA, 17 nt, artificial sequence
  misc_feature: oligonucleotide substrate
cugugugagugcuauga

SEQ ID NO: 1210 - RNA, 17 nt, artificial sequence
  misc_feature: oligonucleotide substrate
gugugagugcuaugacg

SEQ ID NO: 1211 - RNA, 17 nt, artificial sequence
  misc_feature: oligonucleotide substrate
ugagugcuaugacgcgg

SEQ ID NO: 1212 - RNA, 17 nt, artificial sequence
  misc_feature: oligonucleotide substrate
gugcuaugacgcgggau

SEQ ID NO: 1213 - RNA, 17 nt, artificial sequence
  misc_feature: oligonucleotide substrate
gcuaugacgcgggaugu

SEQ ID NO: 1214 - RNA, 17 nt, artificial sequence
  misc_feature: oligonucleotide substrate
gacgcgggaugugcuug

SEQ ID NO: 1215 - RNA, 17 nt, artificial sequence
  misc_feature: oligonucleotide substrate
cgcgggaugugcuuggu

SEQ ID NO: 1216 - RNA, 17 nt, artificial sequence
  misc_feature: oligonucleotide substrate
cgggaugugcuugguac

SEQ ID NO: 1217 - RNA, 17 nt, artificial sequence
  misc_feature: oligonucleotide substrate
ugugcuugguacgagcu

SEQ ID NO: 1218 - RNA, 17 nt, artificial sequence
  misc_feature: oligonucleotide substrate
ugcuugguacgagcuca

SEQ ID NO: 1219 - RNA, 17 nt, artificial sequence
  misc_feature: oligonucleotide substrate
ugguacgagcucacgcc

SEQ ID NO: 1220 - RNA, 17 nt, artificial sequence
  misc_feature: oligonucleotide substrate
acgagcucacgcccgcc

SEQ ID NO: 1221 - RNA, 17 nt, artificial sequence
  misc_feature: oligonucleotide substrate
gagcucacgcccgccga

SEQ ID NO: 1222 - RNA, 17 nt, artificial sequence
  misc_feature: oligonucleotide substrate
ucacgcccgccgagacc

SEQ ID NO: 1223 - RNA, 17 nt, artificial sequence
  misc_feature: oligonucleotide substrate
ccgccgagaccuccguu

SEQ ID NO: 1224 - RNA, 17 nt, artificial sequence
  misc_feature: oligonucleotide substrate
agaccuccguuagguug

SEQ ID NO: 1225 - RNA, 17 nt, artificial sequence
  misc_feature: oligonucleotide substrate
uccguuagguugcgggc

SEQ ID NO: 1226 - RNA, 17 nt, artificial sequence
  misc_feature: oligonucleotide substrate
guuagguugcgggcuua

SEQ ID NO: 1227 - RNA, 17 nt, artificial sequence
  misc_feature: oligonucleotide substrate
gguugcgggcuuaccua

SEQ ID NO: 1228 - RNA, 17 nt, artificial sequence
  misc_feature: oligonucleotide substrate
gcgggcuuaccuaaaua

SEQ ID NO: 1229 - RNA, 17 nt, artificial sequence
  misc_feature: oligonucleotide substrate
uuaccuaaauacaccag

SEQ ID NO: 1230 - RNA, 17 nt, artificial sequence
  misc_feature: oligonucleotide substrate
accuaaauacaccaggg

SEQ ID NO: 1231 - RNA, 17 nt, artificial sequence
  misc_feature: oligonucleotide substrate
cuaaauacaccaggguu

SEQ ID NO: 1232 - RNA, 17 nt, artificial sequence
  misc_feature: oligonucleotide substrate
acaccaggguugcccuu

SEQ ID NO: 1233 - RNA, 17 nt, artificial sequence
  misc_feature: oligonucleotide substrate
ccaggguugcccuucug

SEQ ID NO: 1234 - RNA, 17 nt, artificial sequence
  misc_feature: oligonucleotide substrate
gcccuucugccaggacc

SEQ ID NO: 1235 - RNA, 17 nt, artificial sequence
  misc_feature: oligonucleotide substrate
cugccaggaccaucugg

SEQ ID NO: 1236 - RNA, 17 nt, artificial sequence
  misc_feature: oligonucleotide substrate
ccaggaccaucuggagu

SEQ ID NO: 1237 - RNA, 17 nt, artificial sequence
  misc_feature: oligonucleotide substrate
caucuggaguucuggga

SEQ ID NO: 1238 - RNA, 17 nt, artificial sequence
  misc_feature: oligonucleotide substrate
cugggagggugucuuca

SEQ ID NO: 1239 - RNA, 17 nt, artificial sequence
  misc_feature: oligonucleotide substrate
gggagggugucuucaca

SEQ ID NO: 1240 - RNA, 17 nt, artificial sequence
  misc_feature: oligonucleotide substrate
gugucuucacaggccuc

SEQ ID NO: 1241 - RNA, 17 nt, artificial sequence
  misc_feature: oligonucleotide substrate
cuucacaggccucaccc

SEQ ID NO: 1242 - RNA, 17 nt, artificial sequence
  misc_feature: oligonucleotide substrate
caggccucacccacaua

SEQ ID NO: 1243 - RNA, 17 nt, artificial sequence
  misc_feature: oligonucleotide substrate
ccucacccacauagaug

SEQ ID NO: 1244 - RNA, 17 nt, artificial sequence
  misc_feature: oligonucleotide substrate
ucacccacauagaugcc

SEQ ID NO: 1245 - RNA, 17 nt, artificial sequence
  misc_feature: oligonucleotide substrate
ccacauagaugcccacu

SEQ ID NO: 1246 - RNA, 17 nt, artificial sequence
  misc_feature: oligonucleotide substrate
acauagaugcccacuuc

SEQ ID NO: 1247 - RNA, 17 nt, artificial sequence
  misc_feature: oligonucleotide substrate
agaugcccacuucuugu

SEQ ID NO: 1248 - RNA, 17 nt, artificial sequence
  misc_feature: oligonucleotide substrate
cacuucuugucccagac

SEQ ID NO: 1249 - RNA, 17 nt, artificial sequence
  misc_feature: oligonucleotide substrate
ugucccagaccaagcag

SEQ ID NO: 1250 - RNA, 17 nt, artificial sequence
  misc_feature: oligonucleotide substrate
cagaccaagcaggcagg

SEQ ID NO: 1251 - RNA, 17 nt, artificial sequence
  misc_feature: oligonucleotide substrate
ccaagcaggcaggagaa

SEQ ID NO: 1252 - RNA, 17 nt, artificial sequence
  misc_feature: oligonucleotide substrate
aggagaaaaccuccccu

SEQ ID NO: 1253 - RNA, 17 nt, artificial sequence
  misc_feature: oligonucleotide substrate
ccuccccuaccugguag

SEQ ID NO: 1254 - RNA, 17 nt, artificial sequence
  misc_feature: oligonucleotide substrate
ccuaccugguagcauac

SEQ ID NO: 1255 - RNA, 17 nt, artificial sequence
  misc_feature: oligonucleotide substrate
accugguagcauaccaa

SEQ ID NO: 1256 - RNA, 17 nt, artificial sequence
  misc_feature: oligonucleotide substrate
cugguagcauaccaagc

SEQ ID NO: 1257 - RNA, 17 nt, artificial sequence
  misc_feature: oligonucleotide substrate
gguagcauaccaagcca

SEQ ID NO: 1258 - RNA, 17 nt, artificial sequence
  misc_feature: oligonucleotide substrate
cauaccaagccacagug

SEQ ID NO: 1259 - RNA, 17 nt, artificial sequence
  misc_feature: oligonucleotide substrate
accaagccacagugugc

SEQ ID NO: 1260 - RNA, 17 nt, artificial sequence
  misc_feature: oligonucleotide substrate
aagccacagugugcgcc

SEQ ID NO: 1261 - RNA, 17 nt, artificial sequence
  misc_feature: oligonucleotide substrate
gccacagugugcgccag

SEQ ID NO: 1262 - RNA, 17 nt, artificial sequence
  misc_feature: oligonucleotide substrate
cacagugugcgccaggg

SEQ ID NO: 1263 - RNA, 17 nt, artificial sequence
  misc_feature: oligonucleotide substrate
cagugugcgccagggcu

SEQ ID NO: 1264 - RNA, 17 nt, artificial sequence
  misc_feature: oligonucleotide substrate
gcgccagggcucaggcu

SEQ ID NO: 1265 - RNA, 17 nt, artificial sequence
  misc_feature: oligonucleotide substrate
gggcucaggcuccaccc

SEQ ID NO: 1266 - RNA, 17 nt, artificial sequence
  misc_feature: oligonucleotide substrate
caggcuccacccccauc

SEQ ID NO: 1267 - RNA, 17 nt, artificial sequence
  misc_feature: oligonucleotide substrate
ccacccccaucguggga

SEQ ID NO: 1268 - RNA, 17 nt, artificial sequence
  misc_feature: oligonucleotide substrate
cccccaucgugggauca

SEQ ID NO: 1269 - RNA, 17 nt, artificial sequence
  misc_feature: oligonucleotide substrate
aucgugggaucaaaugu

SEQ ID NO: 1270 - RNA, 17 nt, artificial sequence
  misc_feature: oligonucleotide substrate
gggaucaaauguggaag

SEQ ID NO: 1271 - RNA, 17 nt, artificial sequence
  misc_feature: oligonucleotide substrate
gaucaaauguggaagug

SEQ ID NO: 1272 - RNA, 17 nt, artificial sequence
  misc_feature: oligonucleotide substrate
auguggaagugucucac

SEQ ID NO: 1273 - RNA, 17 nt, artificial sequence
  misc_feature: oligonucleotide substrate
guggaagugucucacac

SEQ ID NO: 1274 - RNA, 17 nt, artificial sequence
  misc_feature: oligonucleotide substrate
agugucucacacggcua

SEQ ID NO: 1275 - RNA, 17 nt, artificial sequence
  misc_feature: oligonucleotide substrate
ugucucacacggcuaaa

SEQ ID NO: 1276 - RNA, 17 nt, artificial sequence
  misc_feature: oligonucleotide substrate
cucacacggcuaaagcc

SEQ ID NO: 1277 - RNA, 17 nt, artificial sequence
  misc_feature: oligonucleotide substrate
cggcuaaagccuacgcu

SEQ ID NO: 1278 - RNA, 17 nt, artificial sequence
  misc_feature: oligonucleotide substrate
uaaagccuacgcuacac

SEQ ID NO: 1279 - RNA, 17 nt, artificial sequence
  misc_feature: oligonucleotide substrate
aagccuacgcuacacgg

SEQ ID NO: 1280 - RNA, 17 nt, artificial sequence
  misc_feature: oligonucleotide substrate
ccuacgcuacacgggcc

SEQ ID NO: 1281 - RNA, 17 nt, artificial sequence
  misc_feature: oligonucleotide substrate
uacgcuacacgggccaa

SEQ ID NO: 1282 - RNA, 17 nt, artificial sequence
  misc_feature: oligonucleotide substrate
cuacacgggccaacacc

SEQ ID NO: 1283 - RNA, 17 nt, artificial sequence
  misc_feature: oligonucleotide substrate
acgggccaacaccccug

SEQ ID NO: 1284 - RNA, 17 nt, artificial sequence
  misc_feature: oligonucleotide substrate
gggccaacaccccugcu

SEQ ID NO: 1285 - RNA, 17 nt, artificial sequence
  misc_feature: oligonucleotide substrate
acaccccugcuguauag

SEQ ID NO: 1286 - RNA, 17 nt, artificial sequence
  misc_feature: oligonucleotide substrate
ccccugcuguauaggcu

SEQ ID NO: 1287 - RNA, 17 nt, artificial sequence
  misc_feature: oligonucleotide substrate
ccugcuguauaggcuag

SEQ ID NO: 1288 - RNA, 17 nt, artificial sequence
  misc_feature: oligonucleotide substrate
cuguauaggcuaggagc

SEQ ID NO: 1289 - RNA, 17 nt, artificial sequence
  misc_feature: oligonucleotide substrate
ggcuaggagccguccaa

SEQ ID NO: 1290 - RNA, 17 nt, artificial sequence
  misc_feature: oligonucleotide substrate
uaggagccguccaaaau

SEQ ID NO: 1291 - RNA, 17 nt, artificial sequence
  misc_feature: oligonucleotide substrate
cguccaaaaugauguca

SEQ ID NO: 1292 - RNA, 17 nt, artificial sequence
  misc_feature: oligonucleotide substrate
ccaaaaugaugucaccc

SEQ ID NO: 1293 - RNA, 17 nt, artificial sequence
  misc_feature: oligonucleotide substrate
aaaaugaugucacccuc

SEQ ID NO: 1294 - RNA, 17 nt, artificial sequence
  misc_feature: oligonucleotide substrate
augaugucacccucaca

SEQ ID NO: 1295 - RNA, 17 nt, artificial sequence
  misc_feature: oligonucleotide substrate
ucacccucacacacccc

SEQ ID NO: 1296 - RNA, 17 nt, artificial sequence
  misc_feature: oligonucleotide substrate
acccucacacaccccau

SEQ ID NO: 1297 - RNA, 17 nt, artificial sequence
  misc_feature: oligonucleotide substrate
ccucacacaccccauaa

SEQ ID NO: 1298 - RNA, 17 nt, artificial sequence
  misc_feature: oligonucleotide substrate
cacaccccauaaccaaa

SEQ ID NO: 1299 - RNA, 17 nt, artificial sequence
  misc_feature: oligonucleotide substrate
accccauaaccaaauac

SEQ ID NO: 1300 - RNA, 17 nt, artificial sequence
  misc_feature: oligonucleotide substrate
auaaccaaauacaucau

SEQ ID NO: 1301 - RNA, 17 nt, artificial sequence
  misc_feature: oligonucleotide substrate
aaccaaauacaucauga

SEQ ID NO: 1302 - RNA, 17 nt, artificial sequence
  misc_feature: oligonucleotide substrate
ccaaauacaucaugaca

SEQ ID NO: 1303 - RNA, 17 nt, artificial sequence
  misc_feature: oligonucleotide substrate
aauacaucaugacaugc

SEQ ID NO: 1304 - RNA, 17 nt, artificial sequence
  misc_feature: oligonucleotide substrate
acaucaugacaugcaug

SEQ ID NO: 1305 - RNA, 17 nt, artificial sequence
  misc_feature: oligonucleotide substrate
aucaugacaugcauguc

SEQ ID NO: 1306 - RNA, 17 nt, artificial sequence
  misc_feature: oligonucleotide substrate
caugacaugcaugucgg

SEQ ID NO: 1307 - RNA, 17 nt, artificial sequence
  misc_feature: oligonucleotide substrate
ugacaugcaugucggcu

SEQ ID NO: 1308 - RNA, 17 nt, artificial sequence
  misc_feature: oligonucleotide substrate
acaugcaugucggcuga

SEQ ID NO: 1309 - RNA, 17 nt, artificial sequence
  misc_feature: oligonucleotide substrate
gcaugucggcugaccug

SEQ ID NO: 1310 - RNA, 17 nt, artificial sequence
  misc_feature: oligonucleotide substrate
gucggcugaccuggagg

SEQ ID NO: 1311 - RNA, 17 nt, artificial sequence
  misc_feature: oligonucleotide substrate
accuggaggucgucacc

SEQ ID NO: 1312 - RNA, 17 nt, artificial sequence
  misc_feature: oligonucleotide substrate
uggaggucgucaccagc

SEQ ID NO: 1313 - RNA, 17 nt, artificial sequence
  misc_feature: oligonucleotide substrate
aggucgucaccagcacc

SEQ ID NO: 1314 - RNA, 17 nt, artificial sequence
  misc_feature: oligonucleotide substrate
cgucaccagcaccuggg

SEQ ID NO: 1315 - RNA, 17 nt, artificial sequence
  misc_feature: oligonucleotide substrate
ucaccagcaccugggug

SEQ ID NO: 1316 - RNA, 17 nt, artificial sequence
  misc_feature: oligonucleotide substrate
gcaccugggugcuagua

SEQ ID NO: 1317 - RNA, 17 nt, artificial sequence
  misc_feature: oligonucleotide substrate
accugggugcuaguagg

SEQ ID NO: 1318 - RNA, 17 nt, artificial sequence
  misc_feature: oligonucleotide substrate
gggugcuaguagguggc

SEQ ID NO: 1319 - RNA, 17 nt, artificial sequence
  misc_feature: oligonucleotide substrate
gcuaguagguggcgucc

SEQ ID NO: 1320 - RNA, 17 nt, artificial sequence
  misc_feature: oligonucleotide substrate
aguagguggcguccugg

SEQ ID NO: 1321 - RNA, 17 nt, artificial sequence
  misc_feature: oligonucleotide substrate
uagguggcguccuggca

SEQ ID NO: 1322 - RNA, 17 nt, artificial sequence
  misc_feature: oligonucleotide substrate
gcguccuggcagcucug

SEQ ID NO: 1323 - RNA, 17 nt, artificial sequence
  misc_feature: oligonucleotide substrate
uccuggcagcucugacc

SEQ ID NO: 1324 - RNA, 17 nt, artificial sequence
  misc_feature: oligonucleotide substrate
cagcucugaccgcguau

SEQ ID NO: 1325 - RNA, 17 nt, artificial sequence
  misc_feature: oligonucleotide substrate
cucugaccgcguauugc

SEQ ID NO: 1326 - RNA, 17 nt, artificial sequence
  misc_feature: oligonucleotide substrate
cugaccgcguauugccu

SEQ ID NO: 1327 - RNA, 17 nt, artificial sequence
  misc_feature: oligonucleotide substrate
gaccgcguauugccuga

SEQ ID NO: 1328 - RNA, 17 nt, artificial sequence
  misc_feature: oligonucleotide substrate
cgcguauugccugacga

SEQ ID NO: 1329 - RNA, 17 nt, artificial sequence
  misc_feature: oligonucleotide substrate
auugccugacgacaggc

SEQ ID NO: 1330 - RNA, 17 nt, artificial sequence
  misc_feature: oligonucleotide substrate
gccugacgacaggcagc

SEQ ID NO: 1331 - RNA, 17 nt, artificial sequence
  misc_feature: oligonucleotide substrate
gacgacaggcagcgugg

SEQ ID NO: 1332 - RNA, 17 nt, artificial sequence
  misc_feature: oligonucleotide substrate
gacaggcagcgugguca

SEQ ID NO: 1333 - RNA, 17 nt, artificial sequence
  misc_feature: oligonucleotide substrate
caggcagcguggucauu

SEQ ID NO: 1334 - RNA, 17 nt, artificial sequence
  misc_feature: oligonucleotide substrate
gcagcguggucauugug

SEQ ID NO: 1335 - RNA, 17 nt, artificial sequence
  misc_feature: oligonucleotide substrate
gcguggucauugugggc

SEQ ID NO: 1336 - RNA, 17 nt, artificial sequence
  misc_feature: oligonucleotide substrate
uggucauugugggcaga

SEQ ID NO: 1337 - RNA, 17 nt, artificial sequence
  misc_feature: oligonucleotide substrate
cauugugggcagaauca

SEQ ID NO: 1338 - RNA, 17 nt, artificial sequence
  misc_feature: oligonucleotide substrate
ugggcagaaucaucuug

SEQ ID NO: 1339 - RNA, 17 nt, artificial sequence
  misc_feature: oligonucleotide substrate
gcagaaucaucuugucc

SEQ ID NO: 1340 - RNA, 17 nt, artificial sequence
  misc_feature: oligonucleotide substrate
aucaucuuguccgggaa

SEQ ID NO: 1341 - RNA, 17 nt, artificial sequence
  misc_feature: oligonucleotide substrate
uccgggaagccggcugu

SEQ ID NO: 1342 - RNA, 17 nt, artificial sequence
  misc_feature: oligonucleotide substrate
ggaagccggcuguuauc

SEQ ID NO: 1343 - RNA, 17 nt, artificial sequence
  misc_feature: oligonucleotide substrate
agccggcuguuaucccc

SEQ ID NO: 1344 - RNA, 17 nt, artificial sequence
  misc_feature: oligonucleotide substrate
cggcuguuauccccgac

SEQ ID NO: 1345 - RNA, 17 nt, artificial sequence
  misc_feature: oligonucleotide substrate
uauccccgacagggagg

SEQ ID NO: 1346 - RNA, 17 nt, artificial sequence
  misc_feature: oligonucleotide substrate
acagggaggcucucuac

SEQ ID NO: 1347 - RNA, 17 nt, artificial sequence
  misc_feature: oligonucleotide substrate
ggcucucuaccaggagu

SEQ ID NO: 1348 - RNA, 17 nt, artificial sequence
  misc_feature: oligonucleotide substrate
uaccaggaguucgauga

SEQ ID NO: 1349 - RNA, 17 nt, artificial sequence
  misc_feature: oligonucleotide substrate
ggaguucgaugagaugg

SEQ ID NO: 1350 - RNA, 17 nt, artificial sequence
  misc_feature: oligonucleotide substrate
ucgaugagauggaggag

SEQ ID NO: 1351 - RNA, 17 nt, artificial sequence
  misc_feature: oligonucleotide substrate
auggaggagugugccuc

SEQ ID NO: 1352 - RNA, 17 nt, artificial sequence
  misc_feature: oligonucleotide substrate
ggaggagugugccucac

SEQ ID NO: 1353 - RNA, 17 nt, artificial sequence
  misc_feature: oligonucleotide substrate
aggagugugccucacac

SEQ ID NO: 1354 - RNA, 17 nt, artificial sequence
  misc_feature: oligonucleotide substrate
ugugccucacaccuccc

SEQ ID NO: 1355 - RNA, 17 nt, artificial sequence
  misc_feature: oligonucleotide substrate
ugccucacaccucccuu

SEQ ID NO: 1356 - RNA, 17 nt, artificial sequence
  misc_feature: oligonucleotide substrate
ccucccuuacaucgaac

SEQ ID NO: 1357 - RNA, 17 nt, artificial sequence
  misc_feature: oligonucleotide substrate
ucccuuacaucgaacag

SEQ ID NO: 1358 - RNA, 17 nt, artificial sequence
  misc_feature: oligonucleotide substrate
uacaucgaacaggggau

SEQ ID NO: 1359 - RNA, 17 nt, artificial sequence
  misc_feature: oligonucleotide substrate
aacaggggaugcagcuc

SEQ ID NO: 1360 - RNA, 17 nt, artificial sequence
  misc_feature: oligonucleotide substrate
caggggaugcagcucgc

SEQ ID NO: 1361 - RNA, 17 nt, artificial sequence
  misc_feature: oligonucleotide substrate
gggaugcagcucgccga

SEQ ID NO: 1362 - RNA, 17 nt, artificial sequence
  misc_feature: oligonucleotide substrate
ugcagcucgccgagcag

SEQ ID NO: 1363 - RNA, 17 nt, artificial sequence
  misc_feature: oligonucleotide substrate
cucgccgagcaguucaa

SEQ ID NO: 1364 - RNA, 17 nt, artificial sequence
  misc_feature: oligonucleotide substrate
gccgagcaguucaagca

SEQ ID NO: 1365 - RNA, 17 nt, artificial sequence
  misc_feature: oligonucleotide substrate
caguucaagcagaaggc

SEQ ID NO: 1366 - RNA, 17 nt, artificial sequence
  misc_feature: oligonucleotide substrate
agcagaaggcgcucgga

SEQ ID NO: 1367 - RNA, 17 nt, artificial sequence
  misc_feature: oligonucleotide substrate
cagaaggcgcucggauu

SEQ ID NO: 1368 - RNA, 17 nt, artificial sequence
  misc_feature: oligonucleotide substrate
gcgcucggauugcugca

SEQ ID NO: 1369 - RNA, 17 nt, artificial sequence
  misc_feature: oligonucleotide substrate
cucggauugcugcaaac

SEQ ID NO: 1370 - RNA, 17 nt, artificial sequence
  misc_feature: oligonucleotide substrate
ggauugcugcaaacagc

SEQ ID NO: 1371 - RNA, 17 nt, artificial sequence
  misc_feature: oligonucleotide substrate
ugcugcaaacagccacc

SEQ ID NO: 1372 - RNA, 17 nt, artificial sequence
  misc_feature: oligonucleotide substrate
ugcaaacagccaccaac

SEQ ID NO: 1373 - RNA, 17 nt, artificial sequence
  misc_feature: oligonucleotide substrate
aaacagccaccaaccaa

SEQ ID NO: 1374 - RNA, 17 nt, artificial sequence
  misc_feature: oligonucleotide substrate
agccaccaaccaagcgg

SEQ ID NO: 1375 - RNA, 17 nt, artificial sequence
  misc_feature: oligonucleotide substrate
ccaaccaagcggaggcu

SEQ ID NO: 1376 - RNA, 17 nt, artificial sequence
  misc_feature: oligonucleotide substrate
aagcggaggcugcugcu

SEQ ID NO: 1377 - RNA, 17 nt, artificial sequence
  misc_feature: oligonucleotide substrate
cggaggcugcugcuccc

SEQ ID NO: 1378 - RNA, 17 nt, artificial sequence
  misc_feature: oligonucleotide substrate
aggcugcugcucccgug

SEQ ID NO: 1379 - RNA, 17 nt, artificial sequence
  misc_feature: oligonucleotide substrate
cugcucccgugguggaa

SEQ ID NO: 1380 - RNA, 17 nt, artificial sequence
  misc_feature: oligonucleotide substrate
cucccgugguggaaucc

SEQ ID NO: 1381 - RNA, 17 nt, artificial sequence
  misc_feature: oligonucleotide substrate
gugguggaauccaagug

SEQ ID NO: 1382 - RNA, 17 nt, artificial sequence
  misc_feature: oligonucleotide substrate
gaauccaaguggcgagc

SEQ ID NO: 1383 - RNA, 17 nt, artificial sequence
  misc_feature: oligonucleotide substrate
uccaaguggcgagcccu

SEQ ID NO: 1384 - RNA, 17 nt, artificial sequence
  misc_feature: oligonucleotide substrate
aguggcgagcccuugag

SEQ ID NO: 1385 - RNA, 17 nt, artificial sequence
  misc_feature: oligonucleotide substrate
cccuugaggcuuucugg

SEQ ID NO: 1386 - RNA, 17 nt, artificial sequence
  misc_feature: oligonucleotide substrate
cuuucugggcgaagcac

SEQ ID NO: 1387 - RNA, 17 nt, artificial sequence
  misc_feature: oligonucleotide substrate
ugggcgaagcacaugug

SEQ ID NO: 1388 - RNA, 17 nt, artificial sequence
  misc_feature: oligonucleotide substrate
ggcgaagcacaugugga

SEQ ID NO: 1389 - RNA, 17 nt, artificial sequence
  misc_feature: oligonucleotide substrate
cgaagcacauguggaau

SEQ ID NO: 1390 - RNA, 17 nt, artificial sequence
  misc_feature: oligonucleotide substrate
aagcacauguggaauuu

SEQ ID NO: 1391 - RNA, 17 nt, artificial sequence
  misc_feature: oligonucleotide substrate
cauguggaauuucauca

SEQ ID NO: 1392 - RNA, 17 nt, artificial sequence
  misc_feature: oligonucleotide substrate
ggaauuucaucagcggg

SEQ ID NO: 1393 - RNA, 17 nt, artificial sequence
  misc_feature: oligonucleotide substrate
uuucaucagcgggauac

SEQ ID NO: 1394 - RNA, 17 nt, artificial sequence
  misc_feature: oligonucleotide substrate
ucagcgggauacaguac

SEQ ID NO: 1395 - RNA, 17 nt, artificial sequence
  misc_feature: oligonucleotide substrate
agcgggauacaguaccu

SEQ ID NO: 1396 - RNA, 17 nt, artificial sequence
  misc_feature: oligonucleotide substrate
gggauacaguaccuagc

SEQ ID NO: 1397 - RNA, 17 nt, artificial sequence
  misc_feature: oligonucleotide substrate
gauacaguaccuagcag

SEQ ID NO: 1398 - RNA, 17 nt, artificial sequence
  misc_feature: oligonucleotide substrate
aguaccuagcaggcuug

SEQ ID NO: 1399 - RNA, 17 nt, artificial sequence
  misc_feature: oligonucleotide substrate
ccuagcaggcuugucca

SEQ ID NO: 1400 - RNA, 17 nt, artificial sequence
  misc_feature: oligonucleotide substrate
gcaggcuuguccacucu

SEQ ID NO: 1401 - RNA, 17 nt, artificial sequence
  misc_feature: oligonucleotide substrate
gcuuguccacucugccu

SEQ ID NO: 1402 - RNA, 17 nt, artificial sequence
  misc_feature: oligonucleotide substrate
uccacucugccugggaa

SEQ ID NO: 1403 - RNA, 17 nt, artificial sequence
  misc_feature: oligonucleotide substrate
gccugggaaccccgcga

SEQ ID NO: 1404 - RNA, 17 nt, artificial sequence
  misc_feature: oligonucleotide substrate
ggaaccccgcgauagca

SEQ ID NO: 1405 - RNA, 17 nt, artificial sequence
  misc_feature: oligonucleotide substrate
accccgcgauagcauca

SEQ ID NO: 1406 - RNA, 17 nt, artificial sequence
  misc_feature: oligonucleotide substrate
ccgcgauagcaucauug

SEQ ID NO: 1407 - RNA, 17 nt, artificial sequence
  misc_feature: oligonucleotide substrate
gcgauagcaucauugau

SEQ ID NO: 1408 - RNA, 17 nt, artificial sequence
  misc_feature: oligonucleotide substrate
auagcaucauugauggc

SEQ ID NO: 1409 - RNA, 17 nt, artificial sequence
  misc_feature: oligonucleotide substrate
caucauugauggcauuc

SEQ ID NO: 1410 - RNA, 17 nt, artificial sequence
  misc_feature: oligonucleotide substrate
cauugauggcauucaca

SEQ ID NO: 1411 - RNA, 17 nt, artificial sequence
  misc_feature: oligonucleotide substrate
uugauggcauucacagc

SEQ ID NO: 1412 - RNA, 17 nt, artificial sequence
  misc_feature: oligonucleotide substrate
uggcauucacagccucc

SEQ ID NO: 1413 - RNA, 17 nt, artificial sequence
  misc_feature: oligonucleotide substrate
cauucacagccuccauc

SEQ ID NO: 1414 - RNA, 17 nt, artificial sequence
  misc_feature: oligonucleotide substrate
cagccuccaucaccagc

SEQ ID NO: 1415 - RNA, 17 nt, artificial sequence
  misc_feature: oligonucleotide substrate
ccuccaucaccagcccg

SEQ ID NO: 1416 - RNA, 17 nt, artificial sequence
  misc_feature: oligonucleotide substrate
caucaccagcccgcuca

SEQ ID NO: 1417 - RNA, 17 nt, artificial sequence
  misc_feature: oligonucleotide substrate
accagcccgcucaccac

SEQ ID NO: 1418 - RNA, 17 nt, artificial sequence
  misc_feature: oligonucleotide substrate
gcccgcucaccacccaa

SEQ ID NO: 1419 - RNA, 17 nt, artificial sequence
  misc_feature: oligonucleotide substrate
cgcucaccacccaaagc

SEQ ID NO: 1420 - RNA, 17 nt, artificial sequence
  misc_feature: oligonucleotide substrate
cacccaaagcacccucc

SEQ ID NO: 1421 - RNA, 17 nt, artificial sequence
  misc_feature: oligonucleotide substrate
cccaaagcacccuccug

SEQ ID NO: 1422 - RNA, 17 nt, artificial sequence
  misc_feature: oligonucleotide substrate
acccuccuguucaacau

SEQ ID NO: 1423 - RNA, 17 nt, artificial sequence
  misc_feature: oligonucleotide substrate
ccuguucaacaucuugg

SEQ ID NO: 1424 - RNA, 17 nt, artificial sequence
  misc_feature: oligonucleotide substrate
uguucaacaucuuggga

SEQ ID NO: 1425 - RNA, 17 nt, artificial sequence
  misc_feature: oligonucleotide substrate
uugggaggguggguggc

SEQ ID NO: 1426 - RNA, 17 nt, artificial sequence
  misc_feature: oligonucleotide substrate
gaggguggguggccgcc

SEQ ID NO: 1427 - RNA, 17 nt, artificial sequence
  misc_feature: oligonucleotide substrate
gguggguggccgcccaa

SEQ ID NO: 1428 - RNA, 17 nt, artificial sequence
  misc_feature: oligonucleotide substrate
ggguggccgcccaacuc

SEQ ID NO: 1429 - RNA, 17 nt, artificial sequence
  misc_feature: oligonucleotide substrate
gccgcccaacucgcucc

SEQ ID NO: 1430 - RNA, 17 nt, artificial sequence
  misc_feature: oligonucleotide substrate
cccaacucgcucccccc

SEQ ID NO: 1431 - RNA, 17 nt, artificial sequence
  misc_feature: oligonucleotide substrate
cccccagagccguuucg

SEQ ID NO: 1432 - RNA, 17 nt, artificial sequence
  misc_feature: oligonucleotide substrate
ccagagccguuucggcc

SEQ ID NO: 1433 - RNA, 17 nt, artificial sequence
  misc_feature: oligonucleotide substrate
ccguuucggccuucgug

SEQ ID NO: 1434 - RNA, 17 nt, artificial sequence
  misc_feature: oligonucleotide substrate
cggccuucgugggcgcc

SEQ ID NO: 1435 - RNA, 17 nt, artificial sequence
  misc_feature: oligonucleotide substrate
cuucgugggcgccggca

SEQ ID NO: 1436 - RNA, 17 nt, artificial sequence
  misc_feature: oligonucleotide substrate
ucgugggcgccggcauc

SEQ ID NO: 1437 - RNA, 17 nt, artificial sequence
  misc_feature: oligonucleotide substrate
gggcgccggcaucgcug

SEQ ID NO: 1438 - RNA, 17 nt, artificial sequence
  misc_feature: oligonucleotide substrate
gcgccggcaucgcuggc

SEQ ID NO: 1439 - RNA, 17 nt, artificial sequence
  misc_feature: oligonucleotide substrate
ccggcaucgcuggcgcg

SEQ ID NO: 1440 - RNA, 17 nt, artificial sequence
  misc_feature: oligonucleotide substrate
caucgcuggcgcggcug

SEQ ID NO: 1441 - RNA, 17 nt, artificial sequence
  misc_feature: oligonucleotide substrate
ucgcuggcgcggcuguu

SEQ ID NO: 1442 - RNA, 17 nt, artificial sequence
  misc_feature: oligonucleotide substrate
cuggcgcggcuguuggc

SEQ ID NO: 1443 - RNA, 17 nt, artificial sequence
  misc_feature: oligonucleotide substrate
gcgcggcuguuggcagc

SEQ ID NO: 1444 - RNA, 17 nt, artificial sequence
  misc_feature: oligonucleotide substrate
ggcuguuggcagcauag

SEQ ID NO: 1445 - RNA, 17 nt, artificial sequence
  misc_feature: oligonucleotide substrate
uguuggcagcauaggcc

SEQ ID NO: 1446 - RNA, 17 nt, artificial sequence
  misc_feature: oligonucleotide substrate
uuggcagcauaggccuu

SEQ ID NO: 1447 - RNA, 17 nt, artificial sequence
  misc_feature: oligonucleotide substrate
cagcauaggccuuggga

SEQ ID NO: 1448 - RNA, 17 nt, artificial sequence
  misc_feature: oligonucleotide substrate
uugggaaggugcuugua

SEQ ID NO: 1449 - RNA, 17 nt, artificial sequence
  misc_feature: oligonucleotide substrate
gggaaggugcuuguaga

SEQ ID NO: 1450 - RNA, 17 nt, artificial sequence
  misc_feature: oligonucleotide substrate
aggugcuuguagacauu

SEQ ID NO: 1451 - RNA, 17 nt, artificial sequence
  misc_feature: oligonucleotide substrate
gcuuguagacauucugg

SEQ ID NO: 1452 - RNA, 17 nt, artificial sequence
  misc_feature: oligonucleotide substrate
uuguagacauucuggcg

SEQ ID NO: 1453 - RNA, 17 nt, artificial sequence
  misc_feature: oligonucleotide substrate
acauucuggcgggcuau

SEQ ID NO: 1454 - RNA, 17 nt, artificial sequence
  misc_feature: oligonucleotide substrate
ucuggcgggcuauggag

SEQ ID NO: 1455 - RNA, 17 nt, artificial sequence
  misc_feature: oligonucleotide substrate
ggcgggcuauggagcag

SEQ ID NO: 1456 - RNA, 17 nt, artificial sequence
  misc_feature: oligonucleotide substrate
gcuauggagcaggagug

SEQ ID NO: 1457 - RNA, 17 nt, artificial sequence
  misc_feature: oligonucleotide substrate
gagcaggaguggcgggu

SEQ ID NO: 1458 - RNA, 17 nt, artificial sequence
  misc_feature: oligonucleotide substrate
caggaguggcgggugcu

SEQ ID NO: 1459 - RNA, 17 nt, artificial sequence
  misc_feature: oligonucleotide substrate
aguggcgggugcucucg

SEQ ID NO: 1460 - RNA, 17 nt, artificial sequence
  misc_feature: oligonucleotide substrate
uggcgggugcucucgug

SEQ ID NO: 1461 - RNA, 17 nt, artificial sequence
  misc_feature: oligonucleotide substrate
gugcucucguggccuuc

SEQ ID NO: 1462 - RNA, 17 nt, artificial sequence
  misc_feature: oligonucleotide substrate
cucucguggccuucaag

SEQ ID NO: 1463 - RNA, 17 nt, artificial sequence
  misc_feature: oligonucleotide substrate
ccuucaaggucaugagc

SEQ ID NO: 1464 - RNA, 17 nt, artificial sequence
  misc_feature: oligonucleotide substrate
ucaaggucaugagcggg

SEQ ID NO: 1465 - RNA, 17 nt, artificial sequence
  misc_feature: oligonucleotide substrate
ggucaugagcggggaga

SEQ ID NO: 1466 - RNA, 17 nt, artificial sequence
  misc_feature: oligonucleotide substrate
gcggggagaugccuucu

SEQ ID NO: 1467 - RNA, 17 nt, artificial sequence
  misc_feature: oligonucleotide substrate
ggggagaugccuucuac

SEQ ID NO: 1468 - RNA, 17 nt, artificial sequence
  misc_feature: oligonucleotide substrate
ugccuucuaccgaggac

SEQ ID NO: 1469 - RNA, 17 nt, artificial sequence
  misc_feature: oligonucleotide substrate
uaccgaggaccugguca

SEQ ID NO: 1470 - RNA, 17 nt, artificial sequence
  misc_feature: oligonucleotide substrate
aggaccuggucaacuua

SEQ ID NO: 1471 - RNA, 17 nt, artificial sequence
  misc_feature: oligonucleotide substrate
ccuggucaacuuacucc

SEQ ID NO: 1472 - RNA, 17 nt, artificial sequence
  misc_feature: oligonucleotide substrate
gucaacuuacucccugc

SEQ ID NO: 1473 - RNA, 17 nt, artificial sequence
  misc_feature: oligonucleotide substrate
uacucccugccauccuc

SEQ ID NO: 1474 - RNA, 17 nt, artificial sequence
  misc_feature: oligonucleotide substrate
ucccugccauccucucu

SEQ ID NO: 1475 - RNA, 17 nt, artificial sequence
  misc_feature: oligonucleotide substrate
cucuccuggcgcccugg

SEQ ID NO: 1476 - RNA, 17 nt, artificial sequence
  misc_feature: oligonucleotide substrate
cuccuggcgcccugguc

SEQ ID NO: 1477 - RNA, 17 nt, artificial sequence
  misc_feature: oligonucleotide substrate
gcgcccuggucgucggg

SEQ ID NO: 1478 - RNA, 17 nt, artificial sequence
  misc_feature: oligonucleotide substrate
cccuggucgucggggug

SEQ ID NO: 1479 - RNA, 17 nt, artificial sequence
  misc_feature: oligonucleotide substrate
ucgucgggguggugugc

SEQ ID NO: 1480 - RNA, 17 nt, artificial sequence
  misc_feature: oligonucleotide substrate
ucgggguggugugcgca

SEQ ID NO: 1481 - RNA, 17 nt, artificial sequence
  misc_feature: oligonucleotide substrate
gggguggugugcgcagc

SEQ ID NO: 1482 - RNA, 17 nt, artificial sequence
  misc_feature: oligonucleotide substrate
gguggugugcgcagcga

SEQ ID NO: 1483 - RNA, 17 nt, artificial sequence
  misc_feature: oligonucleotide substrate
uggugugcgcagcgaua

SEQ ID NO: 1484 - RNA, 17 nt, artificial sequence
  misc_feature: oligonucleotide substrate
ugugcgcagcgauacug

SEQ ID NO: 1485 - RNA, 17 nt, artificial sequence
  misc_feature: oligonucleotide substrate
gcgcagcgauacugcgu

SEQ ID NO: 1486 - RNA, 17 nt, artificial sequence
  misc_feature: oligonucleotide substrate
gcagcgauacugcgucg

SEQ ID NO: 1487 - RNA, 17 nt, artificial sequence
  misc_feature: oligonucleotide substrate
gcgauacugcgucggca

SEQ ID NO: 1488 - RNA, 17 nt, artificial sequence
  misc_feature: oligonucleotide substrate
gauacugcgucggcaug

SEQ ID NO: 1489 - RNA, 17 nt, artificial sequence
  misc_feature: oligonucleotide substrate
cugcgucggcauguggg

SEQ ID NO: 1490 - RNA, 17 nt, artificial sequence
  misc_feature: oligonucleotide substrate
gcgucggcaugugggcc

SEQ ID NO: 1491 - RNA, 17 nt, artificial sequence
  misc_feature: oligonucleotide substrate
gucggcaugugggccca

SEQ ID NO: 1492 - RNA, 17 nt, artificial sequence
  misc_feature: oligonucleotide substrate
gcaugugggcccaggag

SEQ ID NO: 1493 - RNA, 17 nt, artificial sequence
  misc_feature: oligonucleotide substrate
aggagagggcgcugugc

SEQ ID NO: 1494 - RNA, 17 nt, artificial sequence
  misc_feature: oligonucleotide substrate
gagagggcgcugugcag

SEQ ID NO: 1495 - RNA, 17 nt, artificial sequence
  misc_feature: oligonucleotide substrate
agggcgcugugcagugg

SEQ ID NO: 1496 - RNA, 17 nt, artificial sequence
  misc_feature: oligonucleotide substrate
ggcgcugugcaguggau

SEQ ID NO: 1497 - RNA, 17 nt, artificial sequence
  misc_feature: oligonucleotide substrate
gcugugcaguggaugaa

SEQ ID NO: 1498 - RNA, 17 nt, artificial sequence
  misc_feature: oligonucleotide substrate
ugcaguggaugaaucgg

SEQ ID NO: 1499 - RNA, 17 nt, artificial sequence
  misc_feature: oligonucleotide substrate
guggaugaaucggcuga

SEQ ID NO: 1500 - RNA, 17 nt, artificial sequence
  misc_feature: oligonucleotide substrate
augaaucggcugauagc

SEQ ID NO: 1501 - RNA, 17 nt, artificial sequence
  misc_feature: oligonucleotide substrate
aucggcugauagcguuc

SEQ ID NO: 1502 - RNA, 17 nt, artificial sequence
  misc_feature: oligonucleotide substrate
ggcugauagcguucgcu

SEQ ID NO: 1503 - RNA, 17 nt, artificial sequence
  misc_feature: oligonucleotide substrate
cugauagcguucgcuuc

SEQ ID NO: 1504 - RNA, 17 nt, artificial sequence
  misc_feature: oligonucleotide substrate
uagcguucgcuucgcgg

SEQ ID NO: 1505 - RNA, 17 nt, artificial sequence
  misc_feature: oligonucleotide substrate
uucgcuucgcggggcaa

SEQ ID NO: 1506 - RNA, 17 nt, artificial sequence
  misc_feature: oligonucleotide substrate
uucgcggggcaaccaug

SEQ ID NO: 1507 - RNA, 17 nt, artificial sequence
  misc_feature: oligonucleotide substrate
gcggggcaaccaugucu

SEQ ID NO: 1508 - RNA, 17 nt, artificial sequence
  misc_feature: oligonucleotide substrate
gggcaaccaugucuccc

SEQ ID NO: 1509 - RNA, 17 nt, artificial sequence
  misc_feature: oligonucleotide substrate
gcaaccaugucuccccc

SEQ ID NO: 1510 - RNA, 17 nt, artificial sequence
  misc_feature: oligonucleotide substrate
ucucccccacgcacuau

SEQ ID NO: 1511 - RNA, 17 nt, artificial sequence
  misc_feature: oligonucleotide substrate
ucccccacgcacuaugu

SEQ ID NO: 1512 - RNA, 17 nt, artificial sequence
  misc_feature: oligonucleotide substrate
ccccacgcacuaugugc

SEQ ID NO: 1513 - RNA, 17 nt, artificial sequence
  misc_feature: oligonucleotide substrate
cacgcacuaugugccug

SEQ ID NO: 1514 - RNA, 17 nt, artificial sequence
  misc_feature: oligonucleotide substrate
cgcacuaugugccugag

SEQ ID NO: 1515 - RNA, 17 nt, artificial sequence
  misc_feature: oligonucleotide substrate
cacuaugugccugagag

SEQ ID NO: 1516 - RNA, 17 nt, artificial sequence
  misc_feature: oligonucleotide substrate
gccugagagcgacgcag

SEQ ID NO: 1517 - RNA, 17 nt, artificial sequence
  misc_feature: oligonucleotide substrate
ugagagcgacgcagcgg

SEQ ID NO: 1518 - RNA, 17 nt, artificial sequence
  misc_feature: oligonucleotide substrate
agagcgacgcagcggcg

SEQ ID NO: 1519 - RNA, 17 nt, artificial sequence
  misc_feature: oligonucleotide substrate
gcgacgcagcggcgcgc

SEQ ID NO: 1520 - RNA, 17 nt, artificial sequence
  misc_feature: oligonucleotide substrate
acgcagcggcgcgcguc

SEQ ID NO: 1521 - RNA, 17 nt, artificial sequence
  misc_feature: oligonucleotide substrate
gcagcggcgcgcgucac

SEQ ID NO: 1522 - RNA, 17 nt, artificial sequence
  misc_feature: oligonucleotide substrate
agcggcgcgcgucacac

SEQ ID NO: 1523 - RNA, 17 nt, artificial sequence
  misc_feature: oligonucleotide substrate
cggcgcgcgucacacaa

SEQ ID NO: 1524 - RNA, 17 nt, artificial sequence
  misc_feature: oligonucleotide substrate
cgcgcgucacacaaauc

SEQ ID NO: 1525 - RNA, 17 nt, artificial sequence
  misc_feature: oligonucleotide substrate
cgcgucacacaaauccu

SEQ ID NO: 1526 - RNA, 17 nt, artificial sequence
  misc_feature: oligonucleotide substrate
ucacacaaauccucucc

SEQ ID NO: 1527 - RNA, 17 nt, artificial sequence
  misc_feature: oligonucleotide substrate
ccucuccagccucacca

SEQ ID NO: 1528 - RNA, 17 nt, artificial sequence
  misc_feature: oligonucleotide substrate
ccagccucaccaucacu

SEQ ID NO: 1529 - RNA, 17 nt, artificial sequence
  misc_feature: oligonucleotide substrate
gccucaccaucacucag

SEQ ID NO: 1530 - RNA, 17 nt, artificial sequence
  misc_feature: oligonucleotide substrate
ucaccaucacucagcug

SEQ ID NO: 1531 - RNA, 17 nt, artificial sequence
  misc_feature: oligonucleotide substrate
aucacucagcugcugag

SEQ ID NO: 1532 - RNA, 17 nt, artificial sequence
  misc_feature: oligonucleotide substrate
acucagcugcugaggag

SEQ ID NO: 1533 - RNA, 17 nt, artificial sequence
  misc_feature: oligonucleotide substrate
cugaggaggcuccauca

SEQ ID NO: 1534 - RNA, 17 nt, artificial sequence
  misc_feature: oligonucleotide substrate
gaggcuccaucagugga

SEQ ID NO: 1535 - RNA, 17 nt, artificial sequence
  misc_feature: oligonucleotide substrate
cuccaucaguggaucaa

SEQ ID NO: 1536 - RNA, 17 nt, artificial sequence
  misc_feature: oligonucleotide substrate
aucaguggaucaaugag

SEQ ID NO: 1537 - RNA, 17 nt, artificial sequence
  misc_feature: oligonucleotide substrate
guggaucaaugaggacu

SEQ ID NO: 1538 - RNA, 17 nt, artificial sequence
  misc_feature: oligonucleotide substrate
caaugaggacugcucca

SEQ ID NO: 1539 - RNA, 17 nt, artificial sequence
  misc_feature: oligonucleotide substrate
ugaggacugcuccacgc

SEQ ID NO: 1540 - RNA, 17 nt, artificial sequence
  misc_feature: oligonucleotide substrate
acugcuccacgccaugu

SEQ ID NO: 1541 - RNA, 17 nt, artificial sequence
  misc_feature: oligonucleotide substrate
ugcuccacgccauguuc

SEQ ID NO: 1542 - RNA, 17 nt, artificial sequence
  misc_feature: oligonucleotide substrate
uccacgccauguuccgg

SEQ ID NO: 1543 - RNA, 17 nt, artificial sequence
  misc_feature: oligonucleotide substrate
cacgccauguuccggcu

SEQ ID NO: 1544 - RNA, 17 nt, artificial sequence
  misc_feature: oligonucleotide substrate
auguuccggcucguggc

SEQ ID NO: 1545 - RNA, 17 nt, artificial sequence
  misc_feature: oligonucleotide substrate
uccggcucguggcuaag

SEQ ID NO: 1546 - RNA, 17 nt, artificial sequence
  misc_feature: oligonucleotide substrate
ggcucguggcuaaggga

SEQ ID NO: 1547 - RNA, 17 nt, artificial sequence
  misc_feature: oligonucleotide substrate
gcuaagggauguuuggg

SEQ ID NO: 1548 - RNA, 17 nt, artificial sequence
  misc_feature: oligonucleotide substrate
uaagggauguuugggac

SEQ ID NO: 1549 - RNA, 17 nt, artificial sequence
  misc_feature: oligonucleotide substrate
uguuugggacuggauau

SEQ ID NO: 1550 - RNA, 17 nt, artificial sequence
  misc_feature: oligonucleotide substrate
gggacuggauaugcacg

SEQ ID NO: 1551 - RNA, 17 nt, artificial sequence
  misc_feature: oligonucleotide substrate
gacuggauaugcacggu

SEQ ID NO: 1552 - RNA, 17 nt, artificial sequence
  misc_feature: oligonucleotide substrate
cuggauaugcacggugu

SEQ ID NO: 1553 - RNA, 17 nt, artificial sequence
  misc_feature: oligonucleotide substrate
ggauaugcacgguguug

SEQ ID NO: 1554 - RNA, 17 nt, artificial sequence
  misc_feature: oligonucleotide substrate
uaugcacgguguugacu

SEQ ID NO: 1555 - RNA, 17 nt, artificial sequence
  misc_feature: oligonucleotide substrate
ugcacgguguugacuga

SEQ ID NO: 1556 - RNA, 17 nt, artificial sequence
  misc_feature: oligonucleotide substrate
cgguguugacugacuuc

SEQ ID NO: 1557 - RNA, 17 nt, artificial sequence
  misc_feature: oligonucleotide substrate
guugacugacuucaaga

SEQ ID NO: 1558 - RNA, 17 nt, artificial sequence
  misc_feature: oligonucleotide substrate
acuucaagaccuggcuu

SEQ ID NO: 1559 - RNA, 17 nt, artificial sequence
  misc_feature: oligonucleotide substrate
aagaccuggcuucaguc

SEQ ID NO: 1560 - RNA, 17 nt, artificial sequence
  misc_feature: oligonucleotide substrate
uggcuucaguccaagcu

SEQ ID NO: 1561 - RNA, 17 nt, artificial sequence
  misc_feature: oligonucleotide substrate
caguccaagcuccugcc

SEQ ID NO: 1562 - RNA, 17 nt, artificial sequence
  misc_feature: oligonucleotide substrate
aagcuccugccgcgguu

SEQ ID NO: 1563 - RNA, 17 nt, artificial sequence
  misc_feature: oligonucleotide substrate
cuccugccgcgguugcc

SEQ ID NO: 1564 - RNA, 17 nt, artificial sequence
  misc_feature: oligonucleotide substrate
cugccgcgguugccggg

SEQ ID NO: 1565 - RNA, 17 nt, artificial sequence
  misc_feature: oligonucleotide substrate
ccgcgguugccgggagu

SEQ ID NO: 1566 - RNA, 17 nt, artificial sequence
  misc_feature: oligonucleotide substrate
ugccgggagucccuuuc

SEQ ID NO: 1567 - RNA, 17 nt, artificial sequence
  misc_feature: oligonucleotide substrate
uucuucucaugccaacg

SEQ ID NO: 1568 - RNA, 17 nt, artificial sequence
  misc_feature: oligonucleotide substrate
cuucucaugccaacgug

SEQ ID NO: 1569 - RNA, 17 nt, artificial sequence
  misc_feature: oligonucleotide substrate
ucaugccaacgugggua

SEQ ID NO: 1570 - RNA, 17 nt, artificial sequence
  misc_feature: oligonucleotide substrate
augccaacguggguaca

SEQ ID NO: 1571 - RNA, 17 nt, artificial sequence
  misc_feature: oligonucleotide substrate
caacguggguacagggg

SEQ ID NO: 1572 - RNA, 17 nt, artificial sequence
  misc_feature: oligonucleotide substrate
acguggguacagggggg

SEQ ID NO: 1573 - RNA, 17 nt, artificial sequence
  misc_feature: oligonucleotide substrate
acaggggggucuggcgg

SEQ ID NO: 1574 - RNA, 17 nt, artificial sequence
  misc_feature: oligonucleotide substrate
ggggucuggcggggaga

SEQ ID NO: 1575 - RNA, 17 nt, artificial sequence
  misc_feature: oligonucleotide substrate
gcggggagacgguauca

SEQ ID NO: 1576 - RNA, 17 nt, artificial sequence
  misc_feature: oligonucleotide substrate
gggagacgguaucaugc

SEQ ID NO: 1577 - RNA, 17 nt, artificial sequence
  misc_feature: oligonucleotide substrate
gagacgguaucaugcaa

SEQ ID NO: 1578 - RNA, 17 nt, artificial sequence
  misc_feature: oligonucleotide substrate
acgguaucaugcaaacc

SEQ ID NO: 1579 - RNA, 17 nt, artificial sequence
  misc_feature: oligonucleotide substrate
gguaucaugcaaaccac

SEQ ID NO: 1580 - RNA, 17 nt, artificial sequence
  misc_feature: oligonucleotide substrate
ucaugcaaaccaccugc

SEQ ID NO: 1581 - RNA, 17 nt, artificial sequence
  misc_feature: oligonucleotide substrate
ugcaaaccaccugccca

SEQ ID NO: 1582 - RNA, 17 nt, artificial sequence
  misc_feature: oligonucleotide substrate
aaccaccugcccaugcg

SEQ ID NO: 1583 - RNA, 17 nt, artificial sequence
  misc_feature: oligonucleotide substrate
accugcccaugcggagc

SEQ ID NO: 1584 - RNA, 17 nt, artificial sequence
  misc_feature: oligonucleotide substrate
cugcccaugcggagcgc

SEQ ID NO: 1585 - RNA, 17 nt, artificial sequence
  misc_feature: oligonucleotide substrate
caugcggagcgcagauc

SEQ ID NO: 1586 - RNA, 17 nt, artificial sequence
  misc_feature: oligonucleotide substrate
ugcggagcgcagaucac

SEQ ID NO: 1587 - RNA, 17 nt, artificial sequence
  misc_feature: oligonucleotide substrate
gagcgcagaucacugga

SEQ ID NO: 1588 - RNA, 17 nt, artificial sequence
  misc_feature: oligonucleotide substrate
cgcagaucacuggacau

SEQ ID NO: 1589 - RNA, 17 nt, artificial sequence
  misc_feature: oligonucleotide substrate
aucacuggacaugucaa

SEQ ID NO: 1590 - RNA, 17 nt, artificial sequence
  misc_feature: oligonucleotide substrate
cacuggacaugucaaga

SEQ ID NO: 1591 - RNA, 17 nt, artificial sequence
  misc_feature: oligonucleotide substrate
cuggacaugucaagaac

SEQ ID NO: 1592 - RNA, 17 nt, artificial sequence
  misc_feature: oligonucleotide substrate
ugucaagaacgguucca

SEQ ID NO: 1593 - RNA, 17 nt, artificial sequence
  misc_feature: oligonucleotide substrate
caagaacgguuccauga

SEQ ID NO: 1594 - RNA, 17 nt, artificial sequence
  misc_feature: oligonucleotide substrate
acgguuccaugaggauc

SEQ ID NO: 1595 - RNA, 17 nt, artificial sequence
  misc_feature: oligonucleotide substrate
ccaugaggaucgucggg

SEQ ID NO: 1596 - RNA, 17 nt, artificial sequence
  misc_feature: oligonucleotide substrate
ugaggaucgucgggccu

SEQ ID NO: 1597 - RNA, 17 nt, artificial sequence
  misc_feature: oligonucleotide substrate
aucgucgggccuaagac

SEQ ID NO: 1598 - RNA, 17 nt, artificial sequence
  misc_feature: oligonucleotide substrate
ggccuaagaccuguagc

SEQ ID NO: 1599 - RNA, 17 nt, artificial sequence
  misc_feature: oligonucleotide substrate
uaagaccuguagcaaca

SEQ ID NO: 1600 - RNA, 17 nt, artificial sequence
  misc_feature: oligonucleotide substrate
gaccuguagcaacacgu

SEQ ID NO: 1601 - RNA, 17 nt, artificial sequence
  misc_feature: oligonucleotide substrate
cuguagcaacacguggc

SEQ ID NO: 1602 - RNA, 17 nt, artificial sequence
  misc_feature: oligonucleotide substrate
guagcaacacguggcau

SEQ ID NO: 1603 - RNA, 17 nt, artificial sequence
  misc_feature: oligonucleotide substrate
agcaacacguggcaugg

SEQ ID NO: 1604 - RNA, 17 nt, artificial sequence
  misc_feature: oligonucleotide substrate
aacacguggcauggaac

SEQ ID NO: 1605 - RNA, 17 nt, artificial sequence
  misc_feature: oligonucleotide substrate
cacguggcauggaacau

SEQ ID NO: 1606 - RNA, 17 nt, artificial sequence
  misc_feature: oligonucleotide substrate
ggcauggaacauucccc

SEQ ID NO: 1607 - RNA, 17 nt, artificial sequence
  misc_feature: oligonucleotide substrate
cauggaacauuccccau

SEQ ID NO: 1608 - RNA, 17 nt, artificial sequence
  misc_feature: oligonucleotide substrate
cauuccccaucaacgca

SEQ ID NO: 1609 - RNA, 17 nt, artificial sequence
  misc_feature: oligonucleotide substrate
ccccaucaacgcauaca

SEQ ID NO: 1610 - RNA, 17 nt, artificial sequence
  misc_feature: oligonucleotide substrate
ccaucaacgcauacacc

SEQ ID NO: 1611 - RNA, 17 nt, artificial sequence
  misc_feature: oligonucleotide substrate
aucaacgcauacaccac

SEQ ID NO: 1612 - RNA, 17 nt, artificial sequence
  misc_feature: oligonucleotide substrate
caacgcauacaccacgg

SEQ ID NO: 1613 - RNA, 17 nt, artificial sequence
  misc_feature: oligonucleotide substrate
acgcauacaccacgggc

SEQ ID NO: 1614 - RNA, 17 nt, artificial sequence
  misc_feature: oligonucleotide substrate
cauacaccacgggcccc

SEQ ID NO: 1615 - RNA, 17 nt, artificial sequence
  misc_feature: oligonucleotide substrate
caccacgggccccugca

SEQ ID NO: 1616 - RNA, 17 nt, artificial sequence
  misc_feature: oligonucleotide substrate
gggccccugcacacccu

SEQ ID NO: 1617 - RNA, 17 nt, artificial sequence
  misc_feature: oligonucleotide substrate
gccccugcacacccucc

SEQ ID NO: 1618 - RNA, 17 nt, artificial sequence
  misc_feature: oligonucleotide substrate
cccugcacacccucccc

SEQ ID NO: 1619 - RNA, 17 nt, artificial sequence
  misc_feature: oligonucleotide substrate
ccuccccggcgccaaac

SEQ ID NO: 1620 - RNA, 17 nt, artificial sequence
  misc_feature: oligonucleotide substrate
uccccggcgccaaacua

SEQ ID NO: 1621 - RNA, 17 nt, artificial sequence
  misc_feature: oligonucleotide substrate
ggcgccaaacuauucua

SEQ ID NO: 1622 - RNA, 17 nt, artificial sequence
  misc_feature: oligonucleotide substrate
gccaaacuauucuaggg

SEQ ID NO: 1623 - RNA, 17 nt, artificial sequence
  misc_feature: oligonucleotide substrate
auucuagggcgcuaugg

SEQ ID NO: 1624 - RNA, 17 nt, artificial sequence
  misc_feature: oligonucleotide substrate
ucuagggcgcuauggcg

SEQ ID NO: 1625 - RNA, 17 nt, artificial sequence
  misc_feature: oligonucleotide substrate
agggcgcuauggcgggu

SEQ ID NO: 1626 - RNA, 17 nt, artificial sequence
  misc_feature: oligonucleotide substrate
gcgcuauggcggguggc

SEQ ID NO: 1627 - RNA, 17 nt, artificial sequence
  misc_feature: oligonucleotide substrate
uauggcggguggccgcu

SEQ ID NO: 1628 - RNA, 17 nt, artificial sequence
  misc_feature: oligonucleotide substrate
ggcggguggccgcugag

SEQ ID NO: 1629 - RNA, 17 nt, artificial sequence
  misc_feature: oligonucleotide substrate
ggguggccgcugaggag

SEQ ID NO: 1630 - RNA, 17 nt, artificial sequence
  misc_feature: oligonucleotide substrate
gcugaggaguacgugga

SEQ ID NO: 1631 - RNA, 17 nt, artificial sequence
  misc_feature: oligonucleotide substrate
ugaggaguacguggagg

SEQ ID NO: 1632 - RNA, 17 nt, artificial sequence
  misc_feature: oligonucleotide substrate
aggaguacguggagguu

SEQ ID NO: 1633 - RNA, 17 nt, artificial sequence
  misc_feature: oligonucleotide substrate
acguggagguuacgcgg

SEQ ID NO: 1634 - RNA, 17 nt, artificial sequence
  misc_feature: oligonucleotide substrate
uggagguuacgcgggug

SEQ ID NO: 1635 - RNA, 17 nt, artificial sequence
  misc_feature: oligonucleotide substrate
gagguuacgcggguggg

SEQ ID NO: 1636 - RNA, 17 nt, artificial sequence
  misc_feature: oligonucleotide substrate
uuacgcgggugggggau

SEQ ID NO: 1637 - RNA, 17 nt, artificial sequence
  misc_feature: oligonucleotide substrate
ggugggggauuuccacu

SEQ ID NO: 1638 - RNA, 17 nt, artificial sequence
  misc_feature: oligonucleotide substrate
ggauuuccacuacguga

SEQ ID NO: 1639 - RNA, 17 nt, artificial sequence
  misc_feature: oligonucleotide substrate
uuuccacuacgugacgg

SEQ ID NO: 1640 - RNA, 17 nt, artificial sequence
  misc_feature: oligonucleotide substrate
uccacuacgugacgggc

SEQ ID NO: 1641 - RNA, 17 nt, artificial sequence
  misc_feature: oligonucleotide substrate
acuacgugacgggcaug

SEQ ID NO: 1642 - RNA, 17 nt, artificial sequence
  misc_feature: oligonucleotide substrate
cgugacgggcaugacca

SEQ ID NO: 1643 - RNA, 17 nt, artificial sequence
  misc_feature: oligonucleotide substrate
ugacgggcaugaccacu

SEQ ID NO: 1644 - RNA, 17 nt, artificial sequence
  misc_feature: oligonucleotide substrate
cgggcaugaccacugac

SEQ ID NO: 1645 - RNA, 17 nt, artificial sequence
  misc_feature: oligonucleotide substrate
gcaugaccacugacaac

SEQ ID NO: 1646 - RNA, 17 nt, artificial sequence
  misc_feature: oligonucleotide substrate
gaccacugacaacguaa

SEQ ID NO: 1647 - RNA, 17 nt, artificial sequence
  misc_feature: oligonucleotide substrate
cacugacaacguaaaau

SEQ ID NO: 1648 - RNA, 17 nt, artificial sequence
  misc_feature: oligonucleotide substrate
cugacaacguaaaaugc

SEQ ID NO: 1649 - RNA, 17 nt, artificial sequence
  misc_feature: oligonucleotide substrate
aacguaaaaugcccgug

SEQ ID NO: 1650 - RNA, 17 nt, artificial sequence
  misc_feature: oligonucleotide substrate
cguaaaaugcccgugcc

SEQ ID NO: 1651 - RNA, 17 nt, artificial sequence
  misc_feature: oligonucleotide substrate
aaaugcccgugccaggu

SEQ ID NO: 1652 - RNA, 17 nt, artificial sequence
  misc_feature: oligonucleotide substrate
augcccgugccagguuc

SEQ ID NO: 1653 - RNA, 17 nt, artificial sequence
  misc_feature: oligonucleotide substrate
cgugccagguuccgccc

SEQ ID NO: 1654 - RNA, 17 nt, artificial sequence
  misc_feature: oligonucleotide substrate
cagguuccgccccccga

SEQ ID NO: 1655 - RNA, 17 nt, artificial sequence
  misc_feature: oligonucleotide substrate
ccccccgaauucuucac

SEQ ID NO: 1656 - RNA, 17 nt, artificial sequence
  misc_feature: oligonucleotide substrate
aauucuucacggaagug

SEQ ID NO: 1657 - RNA, 17 nt, artificial sequence
  misc_feature: oligonucleotide substrate
ucacggaaguggauggg

SEQ ID NO: 1658 - RNA, 17 nt, artificial sequence
  misc_feature: oligonucleotide substrate
ggaaguggaugggguac

SEQ ID NO: 1659 - RNA, 17 nt, artificial sequence
  misc_feature: oligonucleotide substrate
uggaugggguacgccug

SEQ ID NO: 1660 - RNA, 17 nt, artificial sequence
  misc_feature: oligonucleotide substrate
gaugggguacgccugca

SEQ ID NO: 1661 - RNA, 17 nt, artificial sequence
  misc_feature: oligonucleotide substrate
ugggguacgccugcaca

SEQ ID NO: 1662 - RNA, 17 nt, artificial sequence
  misc_feature: oligonucleotide substrate
guacgccugcacagaaa

SEQ ID NO: 1663 - RNA, 17 nt, artificial sequence
  misc_feature: oligonucleotide substrate
acgccugcacagaaacg

SEQ ID NO: 1664 - RNA, 17 nt, artificial sequence
  misc_feature: oligonucleotide substrate
gcacagaaacgcuccgg

SEQ ID NO: 1665 - RNA, 17 nt, artificial sequence
  misc_feature: oligonucleotide substrate
acagaaacgcuccggcg

SEQ ID NO: 1666 - RNA, 17 nt, artificial sequence
  misc_feature: oligonucleotide substrate
acgcuccggcgugugga

SEQ ID NO: 1667 - RNA, 17 nt, artificial sequence
  misc_feature: oligonucleotide substrate
gcuccggcguguggacc

SEQ ID NO: 1668 - RNA, 17 nt, artificial sequence
  misc_feature: oligonucleotide substrate
uccggcguguggaccuc

SEQ ID NO: 1669 - RNA, 17 nt, artificial sequence
  misc_feature: oligonucleotide substrate
gcguguggaccucuccu

SEQ ID NO: 1670 - RNA, 17 nt, artificial sequence
  misc_feature: oligonucleotide substrate
ccucuccuacgggagga

SEQ ID NO: 1671 - RNA, 17 nt, artificial sequence
  misc_feature: oligonucleotide substrate
gggaggaggucacauuc

SEQ ID NO: 1672 - RNA, 17 nt, artificial sequence
  misc_feature: oligonucleotide substrate
aggaggucacauuccag

SEQ ID NO: 1673 - RNA, 17 nt, artificial sequence
  misc_feature: oligonucleotide substrate
gaggucacauuccaggu

SEQ ID NO: 1674 - RNA, 17 nt, artificial sequence
  misc_feature: oligonucleotide substrate
cauuccaggucgggcuc

SEQ ID NO: 1675 - RNA, 17 nt, artificial sequence
  misc_feature: oligonucleotide substrate
caggucgggcucaacca

SEQ ID NO: 1676 - RNA, 17 nt, artificial sequence
  misc_feature: oligonucleotide substrate
cgggcucaaccaauacc

SEQ ID NO: 1677 - RNA, 17 nt, artificial sequence
  misc_feature: oligonucleotide substrate
cucaaccaauaccuggu

SEQ ID NO: 1678 - RNA, 17 nt, artificial sequence
  misc_feature: oligonucleotide substrate
caaccaauaccugguug

SEQ ID NO: 1679 - RNA, 17 nt, artificial sequence
  misc_feature: oligonucleotide substrate
aauaccugguuggguca

SEQ ID NO: 1680 - RNA, 17 nt, artificial sequence
  misc_feature: oligonucleotide substrate
cugguugggucacagcu

SEQ ID NO: 1681 - RNA, 17 nt, artificial sequence
  misc_feature: oligonucleotide substrate
guugggucacagcuccc

SEQ ID NO: 1682 - RNA, 17 nt, artificial sequence
  misc_feature: oligonucleotide substrate
gggucacagcucccaug

SEQ ID NO: 1683 - RNA, 17 nt, artificial sequence
  misc_feature: oligonucleotide substrate
cagcucccaugcgagcc

SEQ ID NO: 1684 - RNA, 17 nt, artificial sequence
  misc_feature: oligonucleotide substrate
gcucccaugcgagcccg

SEQ ID NO: 1685 - RNA, 17 nt, artificial sequence
  misc_feature: oligonucleotide substrate
ccaugcgagcccgaacc

SEQ ID NO: 1686 - RNA, 17 nt, artificial sequence
  misc_feature: oligonucleotide substrate
gagcccgaaccggaugu

SEQ ID NO: 1687 - RNA, 17 nt, artificial sequence
  misc_feature: oligonucleotide substrate
cgaaccggauguagcag

SEQ ID NO: 1688 - RNA, 17 nt, artificial sequence
  misc_feature: oligonucleotide substrate
aaccggauguagcagug

SEQ ID NO: 1689 - RNA, 17 nt, artificial sequence
  misc_feature: oligonucleotide substrate
cggauguagcagugcuc

SEQ ID NO: 1690 - RNA, 17 nt, artificial sequence
  misc_feature: oligonucleotide substrate
auguagcagugcucacg

SEQ ID NO: 1691 - RNA, 17 nt, artificial sequence
  misc_feature: oligonucleotide substrate
guagcagugcucacguc

SEQ ID NO: 1692 - RNA, 17 nt, artificial sequence
  misc_feature: oligonucleotide substrate
cagugcucacguccaug

SEQ ID NO: 1693 - RNA, 17 nt, artificial sequence
  misc_feature: oligonucleotide substrate
gugcucacguccaugcu

SEQ ID NO: 1694 - RNA, 17 nt, artificial sequence
  misc_feature: oligonucleotide substrate
ucacguccaugcucacc

SEQ ID NO: 1695 - RNA, 17 nt, artificial sequence
  misc_feature: oligonucleotide substrate
acguccaugcucaccga

SEQ ID NO: 1696 - RNA, 17 nt, artificial sequence
  misc_feature: oligonucleotide substrate
ccaugcucaccgacccc

SEQ ID NO: 1697 - RNA, 17 nt, artificial sequence
  misc_feature: oligonucleotide substrate
gcucaccgaccccuccc

SEQ ID NO: 1698 - RNA, 17 nt, artificial sequence
  misc_feature: oligonucleotide substrate
ccccucccacauuacag

SEQ ID NO: 1699 - RNA, 17 nt, artificial sequence
  misc_feature: oligonucleotide substrate
ccucccacauuacagga

SEQ ID NO: 1700 - RNA, 17 nt, artificial sequence
  misc_feature: oligonucleotide substrate
cccacauuacaggagag

SEQ ID NO: 1701 - RNA, 17 nt, artificial sequence
  misc_feature: oligonucleotide substrate
caggagagacggcuaag

SEQ ID NO: 1702 - RNA, 17 nt, artificial sequence
  misc_feature: oligonucleotide substrate
gagagacggcuaagcgu

SEQ ID NO: 1703 - RNA, 17 nt, artificial sequence
  misc_feature: oligonucleotide substrate
acggcuaagcguaggcu

SEQ ID NO: 1704 - RNA, 17 nt, artificial sequence
  misc_feature: oligonucleotide substrate
ggcuaagcguaggcugg

SEQ ID NO: 1705 - RNA, 17 nt, artificial sequence
  misc_feature: oligonucleotide substrate
aagcguaggcuggccag

SEQ ID NO: 1706 - RNA, 17 nt, artificial sequence
  misc_feature: oligonucleotide substrate
guaggcuggccaggggg

SEQ ID NO: 1707 - RNA, 17 nt, artificial sequence
  misc_feature: oligonucleotide substrate
gccagggggucuccccc

SEQ ID NO: 1708 - RNA, 17 nt, artificial sequence
  misc_feature: oligonucleotide substrate
ccuccuuggccagcucc

SEQ ID NO: 1709 - RNA, 17 nt, artificial sequence
  misc_feature: oligonucleotide substrate
cuuggccagcuccucag

SEQ ID NO: 1710 - RNA, 17 nt, artificial sequence
  misc_feature: oligonucleotide substrate
gcuccucagcuagccag

SEQ ID NO: 1711 - RNA, 17 nt, artificial sequence
  misc_feature: oligonucleotide substrate
cucagcuagccagcugu

SEQ ID NO: 1712 - RNA, 17 nt, artificial sequence
  misc_feature: oligonucleotide substrate
gcuagccagcugucugc

SEQ ID NO: 1713 - RNA, 17 nt, artificial sequence
  misc_feature: oligonucleotide substrate
agccagcugucugcgcc

SEQ ID NO: 1714 - RNA, 17 nt, artificial sequence
  misc_feature: oligonucleotide substrate
agcugucugcgccuucu

SEQ ID NO: 1715 - RNA, 17 nt, artificial sequence
  misc_feature: oligonucleotide substrate
cugucugcgccuucuuc

SEQ ID NO: 1716 - RNA, 17 nt, artificial sequence
  misc_feature: oligonucleotide substrate
cuucgaaggcgacauac

SEQ ID NO: 1717 - RNA, 17 nt, artificial sequence
  misc_feature: oligonucleotide substrate
cgaaggcgacauacauu

SEQ ID NO: 1718 - RNA, 17 nt, artificial sequence
  misc_feature: oligonucleotide substrate
aaggcgacauacauuac

SEQ ID NO: 1719 - RNA, 17 nt, artificial sequence
  misc_feature: oligonucleotide substrate
ggcgacauacauuaccc

SEQ ID NO: 1720 - RNA, 17 nt, artificial sequence
  misc_feature: oligonucleotide substrate
cgacauacauuacccaa

SEQ ID NO: 1721 - RNA, 17 nt, artificial sequence
  misc_feature: oligonucleotide substrate
cauacauuacccaauau

SEQ ID NO: 1722 - RNA, 17 nt, artificial sequence
  misc_feature: oligonucleotide substrate
auuacccaauaugacuc

SEQ ID NO: 1723 - RNA, 17 nt, artificial sequence
  misc_feature: oligonucleotide substrate
uacccaauaugacuccc

SEQ ID NO: 1724 - RNA, 17 nt, artificial sequence
  misc_feature: oligonucleotide substrate
ccaauaugacuccccag

SEQ ID NO: 1725 - RNA, 17 nt, artificial sequence
  misc_feature: oligonucleotide substrate
cuccccagacuuugacc

SEQ ID NO: 1726 - RNA, 17 nt, artificial sequence
  misc_feature: oligonucleotide substrate
agacuuugaccucaucg

SEQ ID NO: 1727 - RNA, 17 nt, artificial sequence
  misc_feature: oligonucleotide substrate
uugaccucaucgaggcc

SEQ ID NO: 1728 - RNA, 17 nt, artificial sequence
  misc_feature: oligonucleotide substrate
ucaucgaggccaaccuc

SEQ ID NO: 1729 - RNA, 17 nt, artificial sequence
  misc_feature: oligonucleotide substrate
cgaggccaaccuccugu

SEQ ID NO: 1730 - RNA, 17 nt, artificial sequence
  misc_feature: oligonucleotide substrate
aaccuccuguggcggca

SEQ ID NO: 1731 - RNA, 17 nt, artificial sequence
  misc_feature: oligonucleotide substrate
cuccuguggcggcagga

SEQ ID NO: 1732 - RNA, 17 nt, artificial sequence
  misc_feature: oligonucleotide substrate
cuguggcggcaggagau

SEQ ID NO: 1733 - RNA, 17 nt, artificial sequence
  misc_feature: oligonucleotide substrate
ggcaggagaugggcggu

SEQ ID NO: 1734 - RNA, 17 nt, artificial sequence
  misc_feature: oligonucleotide substrate
ggagaugggcgguaaca

SEQ ID NO: 1735 - RNA, 17 nt, artificial sequence
  misc_feature: oligonucleotide substrate
gaugggcgguaacauca

SEQ ID NO: 1736 - RNA, 17 nt, artificial sequence
  misc_feature: oligonucleotide substrate
gggcgguaacaucacuc

SEQ ID NO: 1737 - RNA, 17 nt, artificial sequence
  misc_feature: oligonucleotide substrate
gcgguaacaucacucgc

SEQ ID NO: 1738 - RNA, 17 nt, artificial sequence
  misc_feature: oligonucleotide substrate
guaacaucacucgcgug

SEQ ID NO: 1739 - RNA, 17 nt, artificial sequence
  misc_feature: oligonucleotide substrate
caucacucgcguggagu

SEQ ID NO: 1740 - RNA, 17 nt, artificial sequence
  misc_feature: oligonucleotide substrate
ucacucgcguggaguca

SEQ ID NO: 1741 - RNA, 17 nt, artificial sequence
  misc_feature: oligonucleotide substrate
cgcguggagucagagaa

SEQ ID NO: 1742 - RNA, 17 nt, artificial sequence
  misc_feature: oligonucleotide substrate
gucagagaauaagguag

SEQ ID NO: 1743 - RNA, 17 nt, artificial sequence
  misc_feature: oligonucleotide substrate
agaauaagguaguuacc

SEQ ID NO: 1744 - RNA, 17 nt, artificial sequence
  misc_feature: oligonucleotide substrate
auaagguaguuacccug

SEQ ID NO: 1745 - RNA, 17 nt, artificial sequence
  misc_feature: oligonucleotide substrate
agguaguuacccuggac

SEQ ID NO: 1746 - RNA, 17 nt, artificial sequence
  misc_feature: oligonucleotide substrate
uacccuggacucuuuug

SEQ ID NO: 1747 - RNA, 17 nt, artificial sequence
  misc_feature: oligonucleotide substrate
cucuuuugacccgcuuc

SEQ ID NO: 1748 - RNA, 17 nt, artificial sequence
  misc_feature: oligonucleotide substrate
uuugacccgcuucgagc

SEQ ID NO: 1749 - RNA, 17 nt, artificial sequence
  misc_feature: oligonucleotide substrate
cgcuucgagcggaggag

SEQ ID NO: 1750 - RNA, 17 nt, artificial sequence
  misc_feature: oligonucleotide substrate
ggaggaggaugagagag

SEQ ID NO: 1751 - RNA, 17 nt, artificial sequence
  misc_feature: oligonucleotide substrate
agagagagguguccauu

SEQ ID NO: 1752 - RNA, 17 nt, artificial sequence
  misc_feature: oligonucleotide substrate
agagagguguccauucc

SEQ ID NO: 1753 - RNA, 17 nt, artificial sequence
  misc_feature: oligonucleotide substrate
agguguccauuccggcg

SEQ ID NO: 1754 - RNA, 17 nt, artificial sequence
  misc_feature: oligonucleotide substrate
ccauuccggcggagauc

SEQ ID NO: 1755 - RNA, 17 nt, artificial sequence
  misc_feature: oligonucleotide substrate
cggcggagauccugcgg

SEQ ID NO: 1756 - RNA, 17 nt, artificial sequence
  misc_feature: oligonucleotide substrate
gagauccugcggaaauc

SEQ ID NO: 1757 - RNA, 17 nt, artificial sequence
  misc_feature: oligonucleotide substrate
cugcggaaauccaagaa

SEQ ID NO: 1758 - RNA, 17 nt, artificial sequence
  misc_feature: oligonucleotide substrate
uccaagaaguuuccuuc

SEQ ID NO: 1759 - RNA, 17 nt, artificial sequence
  misc_feature: oligonucleotide substrate
uuccuucagcguuaccc

SEQ ID NO: 1760 - RNA, 17 nt, artificial sequence
  misc_feature: oligonucleotide substrate
ccuucagcguuacccau

SEQ ID NO: 1761 - RNA, 17 nt, artificial sequence
  misc_feature: oligonucleotide substrate
ucagcguuacccauaug

SEQ ID NO: 1762 - RNA, 17 nt, artificial sequence
  misc_feature: oligonucleotide substrate
cguuacccauaugggca

SEQ ID NO: 1763 - RNA, 17 nt, artificial sequence
  misc_feature: oligonucleotide substrate
uuacccauaugggcacg

SEQ ID NO: 1764 - RNA, 17 nt, artificial sequence
  misc_feature: oligonucleotide substrate
ccauaugggcacgcccg

SEQ ID NO: 1765 - RNA, 17 nt, artificial sequence
  misc_feature: oligonucleotide substrate
auaugggcacgcccgga

SEQ ID NO: 1766 - RNA, 17 nt, artificial sequence
  misc_feature: oligonucleotide substrate
augggcacgcccggauu

SEQ ID NO: 1767 - RNA, 17 nt, artificial sequence
  misc_feature: oligonucleotide substrate
acgcccggauuacaacc

SEQ ID NO: 1768 - RNA, 17 nt, artificial sequence
  misc_feature: oligonucleotide substrate
cccggauuacaacccuc

SEQ ID NO: 1769 - RNA, 17 nt, artificial sequence
  misc_feature: oligonucleotide substrate
ggauuacaacccuccac

SEQ ID NO: 1770 - RNA, 17 nt, artificial sequence
  misc_feature: oligonucleotide substrate
aacccuccacuacuaga

SEQ ID NO: 1771 - RNA, 17 nt, artificial sequence
  misc_feature: oligonucleotide substrate
ccuccacuacuagagcc

SEQ ID NO: 1772 - RNA, 17 nt, artificial sequence
  misc_feature: oligonucleotide substrate
cuacuagagcccuggaa

SEQ ID NO: 1773 - RNA, 17 nt, artificial sequence
  misc_feature: oligonucleotide substrate
cuggaaagacccagacu

SEQ ID NO: 1774 - RNA, 17 nt, artificial sequence
  misc_feature: oligonucleotide substrate
agacccagacuacgucc

SEQ ID NO: 1775 - RNA, 17 nt, artificial sequence
  misc_feature: oligonucleotide substrate
cccagacuacgucccuc

SEQ ID NO: 1776 - RNA, 17 nt, artificial sequence
  misc_feature: oligonucleotide substrate
cagacuacgucccuccg

SEQ ID NO: 1777 - RNA, 17 nt, artificial sequence
  misc_feature: oligonucleotide substrate
ucccuccggugguacac

SEQ ID NO: 1778 - RNA, 17 nt, artificial sequence
  misc_feature: oligonucleotide substrate
cuccggugguacacggg

SEQ ID NO: 1779 - RNA, 17 nt, artificial sequence
  misc_feature: oligonucleotide substrate
ccggugguacacgggug

SEQ ID NO: 1780 - RNA, 17 nt, artificial sequence
  misc_feature: oligonucleotide substrate
ggugguacacgggugcc

SEQ ID NO: 1781 - RNA, 17 nt, artificial sequence
  misc_feature: oligonucleotide substrate
guacacgggugcccauu

SEQ ID NO: 1782 - RNA, 17 nt, artificial sequence
  misc_feature: oligonucleotide substrate
acacgggugcccauugc

SEQ ID NO: 1783 - RNA, 17 nt, artificial sequence
  misc_feature: oligonucleotide substrate
gggugcccauugccacc

SEQ ID NO: 1784 - RNA, 17 nt, artificial sequence
  misc_feature: oligonucleotide substrate
ugcccauugccaccugc

SEQ ID NO: 1785 - RNA, 17 nt, artificial sequence
  misc_feature: oligonucleotide substrate
ccauugccaccugccaa

SEQ ID NO: 1786 - RNA, 17 nt, artificial sequence
  misc_feature: oligonucleotide substrate
ugccaccugccaaggcc

SEQ ID NO: 1787 - RNA, 17 nt, artificial sequence
  misc_feature: oligonucleotide substrate
cugccaaggccccucca

SEQ ID NO: 1788 - RNA, 17 nt, artificial sequence
  misc_feature: oligonucleotide substrate
ccccuccaauaccaccu

SEQ ID NO: 1789 - RNA, 17 nt, artificial sequence
  misc_feature: oligonucleotide substrate
ccuccaauaccaccucc

SEQ ID NO: 1790 - RNA, 17 nt, artificial sequence
  misc_feature: oligonucleotide substrate
ccaauaccaccuccacg

SEQ ID NO: 1791 - RNA, 17 nt, artificial sequence
  misc_feature: oligonucleotide substrate
ccaccuccacggaggaa

SEQ ID NO: 1792 - RNA, 17 nt, artificial sequence
  misc_feature: oligonucleotide substrate
ggaagaggacgguuguu

SEQ ID NO: 1793 - RNA, 17 nt, artificial sequence
  misc_feature: oligonucleotide substrate
agaggacgguuguucug

SEQ ID NO: 1794 - RNA, 17 nt, artificial sequence
  misc_feature: oligonucleotide substrate
ggacgguuguucugaca

SEQ ID NO: 1795 - RNA, 17 nt, artificial sequence
  misc_feature: oligonucleotide substrate
uuguucugacagagucc

SEQ ID NO: 1796 - RNA, 17 nt, artificial sequence
  misc_feature: oligonucleotide substrate
cugacagaguccaccgu

SEQ ID NO: 1797 - RNA, 17 nt, artificial sequence
  misc_feature: oligonucleotide substrate
cagaguccaccgugucu

SEQ ID NO: 1798 - RNA, 17 nt, artificial sequence
  misc_feature: oligonucleotide substrate
aguccaccgugucuucu

SEQ ID NO: 1799 - RNA, 17 nt, artificial sequence
  misc_feature: oligonucleotide substrate
uccaccgugucuucugc

SEQ ID NO: 1800 - RNA, 17 nt, artificial sequence
  misc_feature: oligonucleotide substrate
ugucuucugccuuggcg

SEQ ID NO: 1801 - RNA, 17 nt, artificial sequence
  misc_feature: oligonucleotide substrate
cugccuuggcggagcuc

SEQ ID NO: 1802 - RNA, 17 nt, artificial sequence
  misc_feature: oligonucleotide substrate
uuggcggagcucgccac

SEQ ID NO: 1803 - RNA, 17 nt, artificial sequence
  misc_feature: oligonucleotide substrate
cggagcucgccacaaag

SEQ ID NO: 1804 - RNA, 17 nt, artificial sequence
  misc_feature: oligonucleotide substrate
agcucgccacaaagacc

SEQ ID NO: 1805 - RNA, 17 nt, artificial sequence
  misc_feature: oligonucleotide substrate
ccacaaagaccuucggc

SEQ ID NO: 1806 - RNA, 17 nt, artificial sequence
  misc_feature: oligonucleotide substrate
gaccuucggcagcucug

SEQ ID NO: 1807 - RNA, 17 nt, artificial sequence
  misc_feature: oligonucleotide substrate
cuucggcagcucugaau

SEQ ID NO: 1808 - RNA, 17 nt, artificial sequence
  misc_feature: oligonucleotide substrate
agcucugaaucaucggc

SEQ ID NO: 1809 - RNA, 17 nt, artificial sequence
  misc_feature: oligonucleotide substrate
ucugaaucaucggccgc

SEQ ID NO: 1810 - RNA, 17 nt, artificial sequence
  misc_feature: oligonucleotide substrate
aaucaucggccgcugau

SEQ ID NO: 1811 - RNA, 17 nt, artificial sequence
  misc_feature: oligonucleotide substrate
caucggccgcugauaga

SEQ ID NO: 1812 - RNA, 17 nt, artificial sequence
  misc_feature: oligonucleotide substrate
ggccgcugauagaggua

SEQ ID NO: 1813 - RNA, 17 nt, artificial sequence
  misc_feature: oligonucleotide substrate
ugauagagguacggcaa

SEQ ID NO: 1814 - RNA, 17 nt, artificial sequence
  misc_feature: oligonucleotide substrate
auagagguacggcaacc

SEQ ID NO: 1815 - RNA, 17 nt, artificial sequence
  misc_feature: oligonucleotide substrate
gagguacggcaaccgcc

SEQ ID NO: 1816 - RNA, 17 nt, artificial sequence
  misc_feature: oligonucleotide substrate
guacggcaaccgccccc

SEQ ID NO: 1817 - RNA, 17 nt, artificial sequence
  misc_feature: oligonucleotide substrate
cggcaaccgcccccccc

SEQ ID NO: 1818 - RNA, 17 nt, artificial sequence
  misc_feature: oligonucleotide substrate
cccccccgaccagaccu

SEQ ID NO: 1819 - RNA, 17 nt, artificial sequence
  misc_feature: oligonucleotide substrate
ccgaccagaccuccaau

SEQ ID NO: 1820 - RNA, 17 nt, artificial sequence
  misc_feature: oligonucleotide substrate
gaccuccaaugacggug

SEQ ID NO: 1821 - RNA, 17 nt, artificial sequence
  misc_feature: oligonucleotide substrate
cuccaaugacggugacg

SEQ ID NO: 1822 - RNA, 17 nt, artificial sequence
  misc_feature: oligonucleotide substrate
caaugacggugacgcag

SEQ ID NO: 1823 - RNA, 17 nt, artificial sequence
  misc_feature: oligonucleotide substrate
ugacggugacgcaggau

SEQ ID NO: 1824 - RNA, 17 nt, artificial sequence
  misc_feature: oligonucleotide substrate
acggugacgcaggaucc

SEQ ID NO: 1825 - RNA, 17 nt, artificial sequence
  misc_feature: oligonucleotide substrate
gacgcaggauccgacgu

SEQ ID NO: 1826 - RNA, 17 nt, artificial sequence
  misc_feature: oligonucleotide substrate
aggauccgacguugagu

SEQ ID NO: 1827 - RNA, 17 nt, artificial sequence
  misc_feature: oligonucleotide substrate
gauccgacguugagucg

SEQ ID NO: 1828 - RNA, 17 nt, artificial sequence
  misc_feature: oligonucleotide substrate
gacguugagucguacuc

SEQ ID NO: 1829 - RNA, 17 nt, artificial sequence
  misc_feature: oligonucleotide substrate
guugagucguacuccuc

SEQ ID NO: 1830 - RNA, 17 nt, artificial sequence
  misc_feature: oligonucleotide substrate
ugagucguacuccucua

SEQ ID NO: 1831 - RNA, 17 nt, artificial sequence
  misc_feature: oligonucleotide substrate
acuccucuaugcccccc

SEQ ID NO: 1832 - RNA, 17 nt, artificial sequence
  misc_feature: oligonucleotide substrate
uccucuaugcccccccu

SEQ ID NO: 1833 - RNA, 17 nt, artificial sequence
  misc_feature: oligonucleotide substrate
gagggggagccggggga

SEQ ID NO: 1834 - RNA, 17 nt, artificial sequence
  misc_feature: oligonucleotide substrate
gccgggggaucccgauc

SEQ ID NO: 1835 - RNA, 17 nt, artificial sequence
  misc_feature: oligonucleotide substrate
ggaucccgaucucagcg

SEQ ID NO: 1836 - RNA, 17 nt, artificial sequence
  misc_feature: oligonucleotide substrate
cgaucucagcgacgggu

SEQ ID NO: 1837 - RNA, 17 nt, artificial sequence
  misc_feature: oligonucleotide substrate
ucucagcgacgggucuu

SEQ ID NO: 1838 - RNA, 17 nt, artificial sequence
  misc_feature: oligonucleotide substrate
agcgacgggucuugguc

SEQ ID NO: 1839 - RNA, 17 nt, artificial sequence
  misc_feature: oligonucleotide substrate
gggucuuggucuaccgu

SEQ ID NO: 1840 - RNA, 17 nt, artificial sequence
  misc_feature: oligonucleotide substrate
cuuggucuaccgugagc

SEQ ID NO: 1841 - RNA, 17 nt, artificial sequence
  misc_feature: oligonucleotide substrate
ggucuaccgugagcgaa

SEQ ID NO: 1842 - RNA, 17 nt, artificial sequence
  misc_feature: oligonucleotide substrate
uaccgugagcgaagagg

SEQ ID NO: 1843 - RNA, 17 nt, artificial sequence
  misc_feature: oligonucleotide substrate
gcgaagaggcuggcgag

SEQ ID NO: 1844 - RNA, 17 nt, artificial sequence
  misc_feature: oligonucleotide substrate
agaggcuggcgaggaug

SEQ ID NO: 1845 - RNA, 17 nt, artificial sequence
  misc_feature: oligonucleotide substrate
uggcgaggaugucgucu

SEQ ID NO: 1846 - RNA, 17 nt, artificial sequence
  misc_feature: oligonucleotide substrate
gcgaggaugucgucugc

SEQ ID NO: 1847 - RNA, 17 nt, artificial sequence
  misc_feature: oligonucleotide substrate
aggaugucgucugcugc

SEQ ID NO: 1848 - RNA, 17 nt, artificial sequence
  misc_feature: oligonucleotide substrate
ugucgucugcugcucga

SEQ ID NO: 1849 - RNA, 17 nt, artificial sequence
  misc_feature: oligonucleotide substrate
cgucugcugcucgaugu

SEQ ID NO: 1850 - RNA, 17 nt, artificial sequence
  misc_feature: oligonucleotide substrate
gcugcucgauguccuac

SEQ ID NO: 1851 - RNA, 17 nt, artificial sequence
  misc_feature: oligonucleotide substrate
ugcucgauguccuacac

SEQ ID NO: 1852 - RNA, 17 nt, artificial sequence
  misc_feature: oligonucleotide substrate
gauguccuacacaugga

SEQ ID NO: 1853 - RNA, 17 nt, artificial sequence
  misc_feature: oligonucleotide substrate
uguccuacacauggacg

SEQ ID NO: 1854 - RNA, 17 nt, artificial sequence
  misc_feature: oligonucleotide substrate
uccuacacauggacggg

SEQ ID NO: 1855 - RNA, 17 nt, artificial sequence
  misc_feature: oligonucleotide substrate
acacauggacgggcgcc

SEQ ID NO: 1856 - RNA, 17 nt, artificial sequence
  misc_feature: oligonucleotide substrate
auggacgggcgcccuga

SEQ ID NO: 1857 - RNA, 17 nt, artificial sequence
  misc_feature: oligonucleotide substrate
ggacgggcgcccugauc

SEQ ID NO: 1858 - RNA, 17 nt, artificial sequence
  misc_feature: oligonucleotide substrate
gcgcccugaucacgcca

SEQ ID NO: 1859 - RNA, 17 nt, artificial sequence
  misc_feature: oligonucleotide substrate
cccugaucacgccaugc

SEQ ID NO: 1860 - RNA, 17 nt, artificial sequence
  misc_feature: oligonucleotide substrate
cugaucacgccaugcgc

SEQ ID NO: 1861 - RNA, 17 nt, artificial sequence
  misc_feature: oligonucleotide substrate
aucacgccaugcgcugc

SEQ ID NO: 1862 - RNA, 17 nt, artificial sequence
  misc_feature: oligonucleotide substrate
cacgccaugcgcugcgg

SEQ ID NO: 1863 - RNA, 17 nt, artificial sequence
  misc_feature: oligonucleotide substrate
cgccaugcgcugcggag

SEQ ID NO: 1864 - RNA, 17 nt, artificial sequence
  misc_feature: oligonucleotide substrate
caugcgcugcggaggaa

SEQ ID NO: 1865 - RNA, 17 nt, artificial sequence
  misc_feature: oligonucleotide substrate
ggaggaaagcaaguugc

SEQ ID NO: 1866 - RNA, 17 nt, artificial sequence
  misc_feature: oligonucleotide substrate
gaaagcaaguugcccau

SEQ ID NO: 1867 - RNA, 17 nt, artificial sequence
  misc_feature: oligonucleotide substrate
agcaaguugcccaucaa

SEQ ID NO: 1868 - RNA, 17 nt, artificial sequence
  misc_feature: oligonucleotide substrate
aguugcccaucaacgcg

SEQ ID NO: 1869 - RNA, 17 nt, artificial sequence
  misc_feature: oligonucleotide substrate
gcccaucaacgcguuga

SEQ ID NO: 1870 - RNA, 17 nt, artificial sequence
  misc_feature: oligonucleotide substrate
ccaucaacgcguugagc

SEQ ID NO: 1871 - RNA, 17 nt, artificial sequence
  misc_feature: oligonucleotide substrate
aucaacgcguugagcaa

SEQ ID NO: 1872 - RNA, 17 nt, artificial sequence
  misc_feature: oligonucleotide substrate
cgcguugagcaacucuu

SEQ ID NO: 1873 - RNA, 17 nt, artificial sequence
  misc_feature: oligonucleotide substrate
guugagcaacucuuugc

SEQ ID NO: 1874 - RNA, 17 nt, artificial sequence
  misc_feature: oligonucleotide substrate
aacucuuugcugcguca

SEQ ID NO: 1875 - RNA, 17 nt, artificial sequence
  misc_feature: oligonucleotide substrate
ucuuugcugcgucacca

SEQ ID NO: 1876 - RNA, 17 nt, artificial sequence
  misc_feature: oligonucleotide substrate
uuugcugcgucaccaca

SEQ ID NO: 1877 - RNA, 17 nt, artificial sequence
  misc_feature: oligonucleotide substrate
gcugcgucaccacaaca

SEQ ID NO: 1878 - RNA, 17 nt, artificial sequence
  misc_feature: oligonucleotide substrate
gcgucaccacaacaugg

SEQ ID NO: 1879 - RNA, 17 nt, artificial sequence
  misc_feature: oligonucleotide substrate
ucaccacaacauggucu

SEQ ID NO: 1880 - RNA, 17 nt, artificial sequence
  misc_feature: oligonucleotide substrate
accacaacauggucuac

SEQ ID NO: 1881 - RNA, 17 nt, artificial sequence
  misc_feature: oligonucleotide substrate
acaacauggucuacgcu

SEQ ID NO: 1882 - RNA, 17 nt, artificial sequence
  misc_feature: oligonucleotide substrate
cauggucuacgcuacaa

SEQ ID NO: 1883 - RNA, 17 nt, artificial sequence
  misc_feature: oligonucleotide substrate
uggucuacgcuacaaca

SEQ ID NO: 1884 - RNA, 17 nt, artificial sequence
  misc_feature: oligonucleotide substrate
ucuacgcuacaacaucu

SEQ ID NO: 1885 - RNA, 17 nt, artificial sequence
  misc_feature: oligonucleotide substrate
acgcuacaacaucucgc

SEQ ID NO: 1886 - RNA, 17 nt, artificial sequence
  misc_feature: oligonucleotide substrate
gcuacaacaucucgcag

SEQ ID NO: 1887 - RNA, 17 nt, artificial sequence
  misc_feature: oligonucleotide substrate
aacaucucgcagcgcaa

SEQ ID NO: 1888 - RNA, 17 nt, artificial sequence
  misc_feature: oligonucleotide substrate
aucucgcagcgcaagcc

SEQ ID NO: 1889 - RNA, 17 nt, artificial sequence
  misc_feature: oligonucleotide substrate
cucgcagcgcaagccag

SEQ ID NO: 1890 - RNA, 17 nt, artificial sequence
  misc_feature: oligonucleotide substrate
cagcgcaagccagcggc

SEQ ID NO: 1891 - RNA, 17 nt, artificial sequence
  misc_feature: oligonucleotide substrate
gcaagccagcggcagaa

SEQ ID NO: 1892 - RNA, 17 nt, artificial sequence
  misc_feature: oligonucleotide substrate
agccagcggcagaagaa

SEQ ID NO: 1893 - RNA, 17 nt, artificial sequence
  misc_feature: oligonucleotide substrate
agaagaaggucaccuuu

SEQ ID NO: 1894 - RNA, 17 nt, artificial sequence
  misc_feature: oligonucleotide substrate
agaaggucaccuuugac

SEQ ID NO: 1895 - RNA, 17 nt, artificial sequence
  misc_feature: oligonucleotide substrate
caccuuugacagacugc

SEQ ID NO: 1896 - RNA, 17 nt, artificial sequence
  misc_feature: oligonucleotide substrate
uuugacagacugcaagu

SEQ ID NO: 1897 - RNA, 17 nt, artificial sequence
  misc_feature: oligonucleotide substrate
gacagacugcaaguccu

SEQ ID NO: 1898 - RNA, 17 nt, artificial sequence
  misc_feature: oligonucleotide substrate
gacugcaaguccuggac

SEQ ID NO: 1899 - RNA, 17 nt, artificial sequence
  misc_feature: oligonucleotide substrate
aguccuggacgaccacu

SEQ ID NO: 1900 - RNA, 17 nt, artificial sequence
  misc_feature: oligonucleotide substrate
ccuggacgaccacuacc

SEQ ID NO: 1901 - RNA, 17 nt, artificial sequence
  misc_feature: oligonucleotide substrate
ggacgaccacuaccggg

SEQ ID NO: 1902 - RNA, 17 nt, artificial sequence
  misc_feature: oligonucleotide substrate
cgaccacuaccgggacg

SEQ ID NO: 1903 - RNA, 17 nt, artificial sequence
  misc_feature: oligonucleotide substrate
cuaccgggacgugcuca

SEQ ID NO: 1904 - RNA, 17 nt, artificial sequence
  misc_feature: oligonucleotide substrate
accgggacgugcucaag

SEQ ID NO: 1905 - RNA, 17 nt, artificial sequence
  misc_feature: oligonucleotide substrate
cgggacgugcucaagga

SEQ ID NO: 1906 - RNA, 17 nt, artificial sequence
  misc_feature: oligonucleotide substrate
ucaaggagaugaaggcg

SEQ ID NO: 1907 - RNA, 17 nt, artificial sequence
  misc_feature: oligonucleotide substrate
agaugaaggcgaaggcg

SEQ ID NO: 1908 - RNA, 17 nt, artificial sequence
  misc_feature: oligonucleotide substrate
aggcgaaggcguccaca

SEQ ID NO: 1909 - RNA, 17 nt, artificial sequence
  misc_feature: oligonucleotide substrate
gcgaaggcguccacagu

SEQ ID NO: 1910 - RNA, 17 nt, artificial sequence
  misc_feature: oligonucleotide substrate
aggcguccacaguuaag

SEQ ID NO: 1911 - RNA, 17 nt, artificial sequence
  misc_feature: oligonucleotide substrate
cguccacaguuaaggcu

SEQ ID NO: 1912 - RNA, 17 nt, artificial sequence
  misc_feature: oligonucleotide substrate
caguuaaggcuaaacuu

SEQ ID NO: 1913 - RNA, 17 nt, artificial sequence
  misc_feature: oligonucleotide substrate
aaggcuaaacuucuauc

SEQ ID NO: 1914 - RNA, 17 nt, artificial sequence
  misc_feature: oligonucleotide substrate
aaacuucuauccguaga

SEQ ID NO: 1915 - RNA, 17 nt, artificial sequence
  misc_feature: oligonucleotide substrate
uucuauccguagaggaa

SEQ ID NO: 1916 - RNA, 17 nt, artificial sequence
  misc_feature: oligonucleotide substrate
uagaggaagccugcaga

SEQ ID NO: 1917 - RNA, 17 nt, artificial sequence
  misc_feature: oligonucleotide substrate
ggaagccugcagacuga

SEQ ID NO: 1918 - RNA, 17 nt, artificial sequence
  misc_feature: oligonucleotide substrate
gccugcagacugacgcc

SEQ ID NO: 1919 - RNA, 17 nt, artificial sequence
  misc_feature: oligonucleotide substrate
gcagacugacgccccca

SEQ ID NO: 1920 - RNA, 17 nt, artificial sequence
  misc_feature: oligonucleotide substrate
agacugacgcccccaca

SEQ ID NO: 1921 - RNA, 17 nt, artificial sequence
  misc_feature: oligonucleotide substrate
acgcccccacauucggc

SEQ ID NO: 1922 - RNA, 17 nt, artificial sequence
  misc_feature: oligonucleotide substrate
gcccccacauucggcca

SEQ ID NO: 1923 - RNA, 17 nt, artificial sequence
  misc_feature: oligonucleotide substrate
cacauucggccaggucc

SEQ ID NO: 1924 - RNA, 17 nt, artificial sequence
  misc_feature: oligonucleotide substrate
ucggccagguccaaauu

SEQ ID NO: 1925 - RNA, 17 nt, artificial sequence
  misc_feature: oligonucleotide substrate
agguccaaauuugguua

SEQ ID NO: 1926 - RNA, 17 nt, artificial sequence
  misc_feature: oligonucleotide substrate
caaauuugguuaugggg

SEQ ID NO: 1927 - RNA, 17 nt, artificial sequence
  misc_feature: oligonucleotide substrate
auuugguuauggggcaa

SEQ ID NO: 1928 - RNA, 17 nt, artificial sequence
  misc_feature: oligonucleotide substrate
guuauggggcaaaggac

SEQ ID NO: 1929 - RNA, 17 nt, artificial sequence
  misc_feature: oligonucleotide substrate
ggcaaaggacguccgga

SEQ ID NO: 1930 - RNA, 17 nt, artificial sequence
  misc_feature: oligonucleotide substrate
caaaggacguccggaac

SEQ ID NO: 1931 - RNA, 17 nt, artificial sequence
  misc_feature: oligonucleotide substrate
cguccggaaccuaucca

SEQ ID NO: 1932 - RNA, 17 nt, artificial sequence
  misc_feature: oligonucleotide substrate
cggaaccuauccagcgg

SEQ ID NO: 1933 - RNA, 17 nt, artificial sequence
  misc_feature: oligonucleotide substrate
ccuauccagcggggccg

SEQ ID NO: 1934 - RNA, 17 nt, artificial sequence
  misc_feature: oligonucleotide substrate
ccagcggggccgucaac

SEQ ID NO: 1935 - RNA, 17 nt, artificial sequence
  misc_feature: oligonucleotide substrate
gcggggccgucaaccac

SEQ ID NO: 1936 - RNA, 17 nt, artificial sequence
  misc_feature: oligonucleotide substrate
ggccgucaaccacaucc

SEQ ID NO: 1937 - RNA, 17 nt, artificial sequence
  misc_feature: oligonucleotide substrate
cgucaaccacauccgcu

SEQ ID NO: 1938 - RNA, 17 nt, artificial sequence
  misc_feature: oligonucleotide substrate
ucaaccacauccgcucc

SEQ ID NO: 1939 - RNA, 17 nt, artificial sequence
  misc_feature: oligonucleotide substrate
ccacauccgcuccgugu

SEQ ID NO: 1940 - RNA, 17 nt, artificial sequence
  misc_feature: oligonucleotide substrate
uccgcuccguguggaag

SEQ ID NO: 1941 - RNA, 17 nt, artificial sequence
  misc_feature: oligonucleotide substrate
cgcuccguguggaagga

SEQ ID NO: 1942 - RNA, 17 nt, artificial sequence
  misc_feature: oligonucleotide substrate
guggaaggacuugcugg

SEQ ID NO: 1943 - RNA, 17 nt, artificial sequence
  misc_feature: oligonucleotide substrate
aaggacuugcuggaaga

SEQ ID NO: 1944 - RNA, 17 nt, artificial sequence
  misc_feature: oligonucleotide substrate
gcuggaagacacugaga

SEQ ID NO: 1945 - RNA, 17 nt, artificial sequence
  misc_feature: oligonucleotide substrate
uggaagacacugagaca

SEQ ID NO: 1946 - RNA, 17 nt, artificial sequence
  misc_feature: oligonucleotide substrate
acacugagacaccaauu

SEQ ID NO: 1947 - RNA, 17 nt, artificial sequence
  misc_feature: oligonucleotide substrate
acugagacaccaauuga

SEQ ID NO: 1948 - RNA, 17 nt, artificial sequence
  misc_feature: oligonucleotide substrate
agacaccaauugauacc

SEQ ID NO: 1949 - RNA, 17 nt, artificial sequence
  misc_feature: oligonucleotide substrate
accaauugauaccacca

SEQ ID NO: 1950 - RNA, 17 nt, artificial sequence
  misc_feature: oligonucleotide substrate
caauugauaccaccauc

SEQ ID NO: 1951 - RNA, 17 nt, artificial sequence
  misc_feature: oligonucleotide substrate
uugauaccaccaucaug

SEQ ID NO: 1952 - RNA, 17 nt, artificial sequence
  misc_feature: oligonucleotide substrate
auaccaccaucauggca

SEQ ID NO: 1953 - RNA, 17 nt, artificial sequence
  misc_feature: oligonucleotide substrate
ccaccaucauggcaaaa

SEQ ID NO: 1954 - RNA, 17 nt, artificial sequence
  misc_feature: oligonucleotide substrate
ccaucauggcaaaaaau

SEQ ID NO: 1955 - RNA, 17 nt, artificial sequence
  misc_feature: oligonucleotide substrate
ggcaaaaaaugagguuu

SEQ ID NO: 1956 - RNA, 17 nt, artificial sequence
  misc_feature: oligonucleotide substrate
aaaaugagguuuucugc

SEQ ID NO: 1957 - RNA, 17 nt, artificial sequence
  misc_feature: oligonucleotide substrate
gguuuucugcguccaac

SEQ ID NO: 1958 - RNA, 17 nt, artificial sequence
  misc_feature: oligonucleotide substrate
uuuucugcguccaacca

SEQ ID NO: 1959 - RNA, 17 nt, artificial sequence
  misc_feature: oligonucleotide substrate
ugcguccaaccagagaa

SEQ ID NO: 1960 - RNA, 17 nt, artificial sequence
  misc_feature: oligonucleotide substrate
gaaaggaggccgcaagc

SEQ ID NO: 1961 - RNA, 17 nt, artificial sequence
  misc_feature: oligonucleotide substrate
aggaggccgcaagccag

SEQ ID NO: 1962 - RNA, 17 nt, artificial sequence
  misc_feature: oligonucleotide substrate
ggccgcaagccagcucg

SEQ ID NO: 1963 - RNA, 17 nt, artificial sequence
  misc_feature: oligonucleotide substrate
gcaagccagcucgccuu

SEQ ID NO: 1964 - RNA, 17 nt, artificial sequence
  misc_feature: oligonucleotide substrate
gccagcucgccuuaucg

SEQ ID NO: 1965 - RNA, 17 nt, artificial sequence
  misc_feature: oligonucleotide substrate
cucgccuuaucguguuc

SEQ ID NO: 1966 - RNA, 17 nt, artificial sequence
  misc_feature: oligonucleotide substrate
gccuuaucguguuccca

SEQ ID NO: 1967 - RNA, 17 nt, artificial sequence
  misc_feature: oligonucleotide substrate
cuuaucguguucccaga

SEQ ID NO: 1968 - RNA, 17 nt, artificial sequence
  misc_feature: oligonucleotide substrate
guucccagacuuggggg

SEQ ID NO: 1969 - RNA, 17 nt, artificial sequence
  misc_feature: oligonucleotide substrate
acuuggggguucgugug

SEQ ID NO: 1970 - RNA, 17 nt, artificial sequence
  misc_feature: oligonucleotide substrate
ggggguucgugugugcg

SEQ ID NO: 1971 - RNA, 17 nt, artificial sequence
  misc_feature: oligonucleotide substrate
ggguucgugugugcgag

SEQ ID NO: 1972 - RNA, 17 nt, artificial sequence
  misc_feature: oligonucleotide substrate
guucgugugugcgagaa

SEQ ID NO: 1973 - RNA, 17 nt, artificial sequence
  misc_feature: oligonucleotide substrate
ucgugugugcgagaaaa

SEQ ID NO: 1974 - RNA, 17 nt, artificial sequence
  misc_feature: oligonucleotide substrate
gcgagaaaauggcccuu

SEQ ID NO: 1975 - RNA, 17 nt, artificial sequence
  misc_feature: oligonucleotide substrate
agaaaauggcccuuuac

SEQ ID NO: 1976 - RNA, 17 nt, artificial sequence
  misc_feature: oligonucleotide substrate
ggcccuuuacgacgugg

SEQ ID NO: 1977 - RNA, 17 nt, artificial sequence
  misc_feature: oligonucleotide substrate
ccuuuacgacguggucu

SEQ ID NO: 1978 - RNA, 17 nt, artificial sequence
  misc_feature: oligonucleotide substrate
uuuacgacguggucucc

SEQ ID NO: 1979 - RNA, 17 nt, artificial sequence
  misc_feature: oligonucleotide substrate
acgacguggucuccacc

SEQ ID NO: 1980 - RNA, 17 nt, artificial sequence
  misc_feature: oligonucleotide substrate
uggucuccacccuuccu

SEQ ID NO: 1981 - RNA, 17 nt, artificial sequence
  misc_feature: oligonucleotide substrate
uuccucaggccgugaug

SEQ ID NO: 1982 - RNA, 17 nt, artificial sequence
  misc_feature: oligonucleotide substrate
cucaggccgugaugggc

SEQ ID NO: 1983 - RNA, 17 nt, artificial sequence
  misc_feature: oligonucleotide substrate
aggccgugaugggcucu

SEQ ID NO: 1984 - RNA, 17 nt, artificial sequence
  misc_feature: oligonucleotide substrate
cgugaugggcucuucau

SEQ ID NO: 1985 - RNA, 17 nt, artificial sequence
  misc_feature: oligonucleotide substrate
ggcucuucauacggauu

SEQ ID NO: 1986 - RNA, 17 nt, artificial sequence
  misc_feature: oligonucleotide substrate
cucuucauacggauucc

SEQ ID NO: 1987 - RNA, 17 nt, artificial sequence
  misc_feature: oligonucleotide substrate
ucauacggauuccagua

SEQ ID NO: 1988 - RNA, 17 nt, artificial sequence
  misc_feature: oligonucleotide substrate
ggauuccaguacucucc

SEQ ID NO: 1989 - RNA, 17 nt, artificial sequence
  misc_feature: oligonucleotide substrate
auuccaguacucuccug

SEQ ID NO: 1990 - RNA, 17 nt, artificial sequence
  misc_feature: oligonucleotide substrate
ucuccugggcagcgggu

SEQ ID NO: 1991 - RNA, 17 nt, artificial sequence
  misc_feature: oligonucleotide substrate
ccugggcagcggguuga

SEQ ID NO: 1992 - RNA, 17 nt, artificial sequence
  misc_feature: oligonucleotide substrate
ggcagcggguugaguuc

SEQ ID NO: 1993 - RNA, 17 nt, artificial sequence
  misc_feature: oligonucleotide substrate
cggguugaguuccuggu

SEQ ID NO: 1994 - RNA, 17 nt, artificial sequence
  misc_feature: oligonucleotide substrate
aguuccuggugaaugcc

SEQ ID NO: 1995 - RNA, 17 nt, artificial sequence
  misc_feature: oligonucleotide substrate
ccuggugaaugccugga

SEQ ID NO: 1996 - RNA, 17 nt, artificial sequence
  misc_feature: oligonucleotide substrate
uggugaaugccuggaaa

SEQ ID NO: 1997 - RNA, 17 nt, artificial sequence
  misc_feature: oligonucleotide substrate
gccuggaaaucaaagaa

SEQ ID NO: 1998 - RNA, 17 nt, artificial sequence
  misc_feature: oligonucleotide substrate
ucaaagaaaugcccuau

SEQ ID NO: 1999 - RNA, 17 nt, artificial sequence
  misc_feature: oligonucleotide substrate
aaagaaaugcccuaugg

SEQ ID NO: 2000 - RNA, 17 nt, artificial sequence
  misc_feature: oligonucleotide substrate
aaugcccuaugggcuuu

SEQ ID NO: 2001 - RNA, 17 nt, artificial sequence
  misc_feature: oligonucleotide substrate
cccuaugggcuuugcau

SEQ ID NO: 2002 - RNA, 17 nt, artificial sequence
  misc_feature: oligonucleotide substrate
ugggcuuugcauaugac

SEQ ID NO: 2003 - RNA, 17 nt, artificial sequence
  misc_feature: oligonucleotide substrate
ggcuuugcauaugacac

SEQ ID NO: 2004 - RNA, 17 nt, artificial sequence
  misc_feature: oligonucleotide substrate
cuuugcauaugacaccc

SEQ ID NO: 2005 - RNA, 17 nt, artificial sequence
  misc_feature: oligonucleotide substrate
ugcauaugacacccgcu

SEQ ID NO: 2006 - RNA, 17 nt, artificial sequence
  misc_feature: oligonucleotide substrate
cauaugacacccgcugu

SEQ ID NO: 2007 - RNA, 17 nt, artificial sequence
  misc_feature: oligonucleotide substrate
ugacacccgcuguuucg

SEQ ID NO: 2008 - RNA, 17 nt, artificial sequence
  misc_feature: oligonucleotide substrate
cacccgcuguuucgacu

SEQ ID NO: 2009 - RNA, 17 nt, artificial sequence
  misc_feature: oligonucleotide substrate
cuguuucgacucaacag

SEQ ID NO: 2010 - RNA, 17 nt, artificial sequence
  misc_feature: oligonucleotide substrate
ucgacucaacagucacc

SEQ ID NO: 2011 - RNA, 17 nt, artificial sequence
  misc_feature: oligonucleotide substrate
acucaacagucaccgag

SEQ ID NO: 2012 - RNA, 17 nt, artificial sequence
  misc_feature: oligonucleotide substrate
caacagucaccgagagu

SEQ ID NO: 2013 - RNA, 17 nt, artificial sequence
  misc_feature: oligonucleotide substrate
caccgagagugacaucc

SEQ ID NO: 2014 - RNA, 17 nt, artificial sequence
  misc_feature: oligonucleotide substrate
cgagagugacauccgug

SEQ ID NO: 2015 - RNA, 17 nt, artificial sequence
  misc_feature: oligonucleotide substrate
agagugacauccguguc

SEQ ID NO: 2016 - RNA, 17 nt, artificial sequence
  misc_feature: oligonucleotide substrate
ugacauccgugucgagg

SEQ ID NO: 2017 - RNA, 17 nt, artificial sequence
  misc_feature: oligonucleotide substrate
acauccgugucgaggag

SEQ ID NO: 2018 - RNA, 17 nt, artificial sequence
  misc_feature: oligonucleotide substrate
gucgaggagucaauuua

SEQ ID NO: 2019 - RNA, 17 nt, artificial sequence
  misc_feature: oligonucleotide substrate
aggagucaauuuaccaa

SEQ ID NO: 2020 - RNA, 17 nt, artificial sequence
  misc_feature: oligonucleotide substrate
gucaauuuaccaauguu

SEQ ID NO: 2021 - RNA, 17 nt, artificial sequence
  misc_feature: oligonucleotide substrate
auuuaccaauguuguga

SEQ ID NO: 2022 - RNA, 17 nt, artificial sequence
  misc_feature: oligonucleotide substrate
uuaccaauguugugacu

SEQ ID NO: 2023 - RNA, 17 nt, artificial sequence
  misc_feature: oligonucleotide substrate
ccaauguugugacuugg

SEQ ID NO: 2024 - RNA, 17 nt, artificial sequence
  misc_feature: oligonucleotide substrate
auguugugacuuggccc

SEQ ID NO: 2025 - RNA, 17 nt, artificial sequence
  misc_feature: oligonucleotide substrate
gugacuuggcccccgaa

SEQ ID NO: 2026 - RNA, 17 nt, artificial sequence
  misc_feature: oligonucleotide substrate
cccccgaagccagacag

SEQ ID NO: 2027 - RNA, 17 nt, artificial sequence
  misc_feature: oligonucleotide substrate
gaagccagacaggccau

SEQ ID NO: 2028 - RNA, 17 nt, artificial sequence
  misc_feature: oligonucleotide substrate
ccagacaggccauaagg

SEQ ID NO: 2029 - RNA, 17 nt, artificial sequence
  misc_feature: oligonucleotide substrate
gacaggccauaaggucg

SEQ ID NO: 2030 - RNA, 17 nt, artificial sequence
  misc_feature: oligonucleotide substrate
gccauaaggucgcucac

SEQ ID NO: 2031 - RNA, 17 nt, artificial sequence
  misc_feature: oligonucleotide substrate
auaaggucgcucacaga

SEQ ID NO: 2032 - RNA, 17 nt, artificial sequence
  misc_feature: oligonucleotide substrate
ggucgcucacagagcgg

SEQ ID NO: 2033 - RNA, 17 nt, artificial sequence
  misc_feature: oligonucleotide substrate
cucacagagcggcuuua

SEQ ID NO: 2034 - RNA, 17 nt, artificial sequence
  misc_feature: oligonucleotide substrate
acagagcggcuuuauau

SEQ ID NO: 2035 - RNA, 17 nt, artificial sequence
  misc_feature: oligonucleotide substrate
gcggcuuuauaucgggg

SEQ ID NO: 2036 - RNA, 17 nt, artificial sequence
  misc_feature: oligonucleotide substrate
ggcuuuauaucgggggu

SEQ ID NO: 2037 - RNA, 17 nt, artificial sequence
  misc_feature: oligonucleotide substrate
uaucggggguccucuga

SEQ ID NO: 2038 - RNA, 17 nt, artificial sequence
  misc_feature: oligonucleotide substrate
guccucugacuaauuca

SEQ ID NO: 2039 - RNA, 17 nt, artificial sequence
  misc_feature: oligonucleotide substrate
ucugacuaauucaaaag

SEQ ID NO: 2040 - RNA, 17 nt, artificial sequence
  misc_feature: oligonucleotide substrate
ucaaaagggcagaacug

SEQ ID NO: 2041 - RNA, 17 nt, artificial sequence
  misc_feature: oligonucleotide substrate
agggcagaacugcgguu

SEQ ID NO: 2042 - RNA, 17 nt, artificial sequence
  misc_feature: oligonucleotide substrate
gcagaacugcgguuauc

SEQ ID NO: 2043 - RNA, 17 nt, artificial sequence
  misc_feature: oligonucleotide substrate
gaacugcgguuaucgcc

SEQ ID NO: 2044 - RNA, 17 nt, artificial sequence
  misc_feature: oligonucleotide substrate
cugcgguuaucgccggu

SEQ ID NO: 2045 - RNA, 17 nt, artificial sequence
  misc_feature: oligonucleotide substrate
cgguuaucgccggugcc

SEQ ID NO: 2046 - RNA, 17 nt, artificial sequence
  misc_feature: oligonucleotide substrate
uaucgccggugccgcgc

SEQ ID NO: 2047 - RNA, 17 nt, artificial sequence
  misc_feature: oligonucleotide substrate
ucgccggugccgcgcga

SEQ ID NO: 2048 - RNA, 17 nt, artificial sequence
  misc_feature: oligonucleotide substrate
ccggugccgcgcgagcg

SEQ ID NO: 2049 - RNA, 17 nt, artificial sequence
  misc_feature: oligonucleotide substrate
ggugccgcgcgagcggc

SEQ ID NO: 2050 - RNA, 17 nt, artificial sequence
  misc_feature: oligonucleotide substrate
ccgcgcgagcggcgugc

SEQ ID NO: 2051 - RNA, 17 nt, artificial sequence
  misc_feature: oligonucleotide substrate
cgcgagcggcgugcuga

SEQ ID NO: 2052 - RNA, 17 nt, artificial sequence
  misc_feature: oligonucleotide substrate
cgagcggcgugcugacg

SEQ ID NO: 2053 - RNA, 17 nt, artificial sequence
  misc_feature: oligonucleotide substrate
agcggcgugcugacgac

SEQ ID NO: 2054 - RNA, 17 nt, artificial sequence
  misc_feature: oligonucleotide substrate
gcgugcugacgaccagc

SEQ ID NO: 2055 - RNA, 17 nt, artificial sequence
  misc_feature: oligonucleotide substrate
ugcugacgaccagcugu

SEQ ID NO: 2056 - RNA, 17 nt, artificial sequence
  misc_feature: oligonucleotide substrate
gacgaccagcuguggua

SEQ ID NO: 2057 - RNA, 17 nt, artificial sequence
  misc_feature: oligonucleotide substrate
gaccagcugugguaaua

SEQ ID NO: 2058 - RNA, 17 nt, artificial sequence
  misc_feature: oligonucleotide substrate
cagcugugguaauaccc

SEQ ID NO: 2059 - RNA, 17 nt, artificial sequence
  misc_feature: oligonucleotide substrate
cugugguaauacccuca

SEQ ID NO: 2060 - RNA, 17 nt, artificial sequence
  misc_feature: oligonucleotide substrate
gugguaauacccucaca

SEQ ID NO: 2061 - RNA, 17 nt, artificial sequence
  misc_feature: oligonucleotide substrate
auacccucacauguuac

SEQ ID NO: 2062 - RNA, 17 nt, artificial sequence
  misc_feature: oligonucleotide substrate
acccucacauguuacuu

SEQ ID NO: 2063 - RNA, 17 nt, artificial sequence
  misc_feature: oligonucleotide substrate
ccucacauguuacuuga

SEQ ID NO: 2064 - RNA, 17 nt, artificial sequence
  misc_feature: oligonucleotide substrate
cacauguuacuugaaag

SEQ ID NO: 2065 - RNA, 17 nt, artificial sequence
  misc_feature: oligonucleotide substrate
acuugaaagccucugcg

SEQ ID NO: 2066 - RNA, 17 nt, artificial sequence
  misc_feature: oligonucleotide substrate
aagccucugcggccugu

SEQ ID NO: 2067 - RNA, 17 nt, artificial sequence
  misc_feature: oligonucleotide substrate
ccucugcggccugucga

SEQ ID NO: 2068 - RNA, 17 nt, artificial sequence
  misc_feature: oligonucleotide substrate
ugcggccugucgagcug

SEQ ID NO: 2069 - RNA, 17 nt, artificial sequence
  misc_feature: oligonucleotide substrate
ccugucgagcugcgaag

SEQ ID NO: 2070 - RNA, 17 nt, artificial sequence
  misc_feature: oligonucleotide substrate
gucgagcugcgaagcuc

SEQ ID NO: 2071 - RNA, 17 nt, artificial sequence
  misc_feature: oligonucleotide substrate
gcugcgaagcuccagga

SEQ ID NO: 2072 - RNA, 17 nt, artificial sequence
  misc_feature: oligonucleotide substrate
gcuccaggacugcacga

SEQ ID NO: 2073 - RNA, 17 nt, artificial sequence
  misc_feature: oligonucleotide substrate
ccaggacugcacgaugc

SEQ ID NO: 2074 - RNA, 17 nt, artificial sequence
  misc_feature: oligonucleotide substrate
aggacugcacgaugcuc

SEQ ID NO: 2075 - RNA, 17 nt, artificial sequence
  misc_feature: oligonucleotide substrate
acugcacgaugcucgug

SEQ ID NO: 2076 - RNA, 17 nt, artificial sequence
  misc_feature: oligonucleotide substrate
ugcacgaugcucgugug

SEQ ID NO: 2077 - RNA, 17 nt, artificial sequence
  misc_feature: oligonucleotide substrate
cgaugcucgugugugga

SEQ ID NO: 2078 - RNA, 17 nt, artificial sequence
  misc_feature: oligonucleotide substrate
augcucguguguggaga

SEQ ID NO: 2079 - RNA, 17 nt, artificial sequence
  misc_feature: oligonucleotide substrate
gcucguguguggagacg

SEQ ID NO: 2080 - RNA, 17 nt, artificial sequence
  misc_feature: oligonucleotide substrate
guguggagacgaccugg

SEQ ID NO: 2081 - RNA, 17 nt, artificial sequence
  misc_feature: oligonucleotide substrate
uggagacgaccuggucg

SEQ ID NO: 2082 - RNA, 17 nt, artificial sequence
  misc_feature: oligonucleotide substrate
acgaccuggucguuauc

SEQ ID NO: 2083 - RNA, 17 nt, artificial sequence
  misc_feature: oligonucleotide substrate
accuggucguuaucugu

SEQ ID NO: 2084 - RNA, 17 nt, artificial sequence
  misc_feature: oligonucleotide substrate
uggucguuaucugugaa

SEQ ID NO: 2085 - RNA, 17 nt, artificial sequence
  misc_feature: oligonucleotide substrate
cguuaucugugaaagug

SEQ ID NO: 2086 - RNA, 17 nt, artificial sequence
  misc_feature: oligonucleotide substrate
cugugaaagugcgggga

SEQ ID NO: 2087 - RNA, 17 nt, artificial sequence
  misc_feature: oligonucleotide substrate
gugaaagugcggggacc

SEQ ID NO: 2088 - RNA, 17 nt, artificial sequence
  misc_feature: oligonucleotide substrate
gugcggggacccaagag

SEQ ID NO: 2089 - RNA, 17 nt, artificial sequence
  misc_feature: oligonucleotide substrate
ccaagaggacgcggcga

SEQ ID NO: 2090 - RNA, 17 nt, artificial sequence
  misc_feature: oligonucleotide substrate
aagaggacgcggcgagc

SEQ ID NO: 2091 - RNA, 17 nt, artificial sequence
  misc_feature: oligonucleotide substrate
aggacgcggcgagccua

SEQ ID NO: 2092 - RNA, 17 nt, artificial sequence
  misc_feature: oligonucleotide substrate
cgcggcgagccuacgag

SEQ ID NO: 2093 - RNA, 17 nt, artificial sequence
  misc_feature: oligonucleotide substrate
gcgagccuacgagucuu

SEQ ID NO: 2094 - RNA, 17 nt, artificial sequence
  misc_feature: oligonucleotide substrate
gccuacgagucuucacg

SEQ ID NO: 2095 - RNA, 17 nt, artificial sequence
  misc_feature: oligonucleotide substrate
gagucuucacggaggcu

SEQ ID NO: 2096 - RNA, 17 nt, artificial sequence
  misc_feature: oligonucleotide substrate
ucacggaggcuaugacu

SEQ ID NO: 2097 - RNA, 17 nt, artificial sequence
  misc_feature: oligonucleotide substrate
cggaggcuaugacuagg

SEQ ID NO: 2098 - RNA, 17 nt, artificial sequence
  misc_feature: oligonucleotide substrate
aggcuaugacuagguac

SEQ ID NO: 2099 - RNA, 17 nt, artificial sequence
  misc_feature: oligonucleotide substrate
augacuagguacucugc

SEQ ID NO: 2100 - RNA, 17 nt, artificial sequence
  misc_feature: oligonucleotide substrate
gacuagguacucugccc

SEQ ID NO: 2101 - RNA, 17 nt, artificial sequence
  misc_feature: oligonucleotide substrate
gguacucugcccccccc

SEQ ID NO: 2102 - RNA, 17 nt, artificial sequence
  misc_feature: oligonucleotide substrate
ccccggggacccgcccc

SEQ ID NO: 2103 - RNA, 17 nt, artificial sequence
  misc_feature: oligonucleotide substrate
ggggacccgccccaacc

SEQ ID NO: 2104 - RNA, 17 nt, artificial sequence
  misc_feature: oligonucleotide substrate
ccgccccaaccggaaua

SEQ ID NO: 2105 - RNA, 17 nt, artificial sequence
  misc_feature: oligonucleotide substrate
caaccggaauacgacuu

SEQ ID NO: 2106 - RNA, 17 nt, artificial sequence
  misc_feature: oligonucleotide substrate
accggaauacgacuugg

SEQ ID NO: 2107 - RNA, 17 nt, artificial sequence
  misc_feature: oligonucleotide substrate
ggaauacgacuuggagu

SEQ ID NO: 2108 - RNA, 17 nt, artificial sequence
  misc_feature: oligonucleotide substrate
gacuuggaguugauaac

SEQ ID NO: 2109 - RNA, 17 nt, artificial sequence
  misc_feature: oligonucleotide substrate
uggaguugauaacauca

SEQ ID NO: 2110 - RNA, 17 nt, artificial sequence
  misc_feature: oligonucleotide substrate
aguugauaacaucaugc

SEQ ID NO: 2111 - RNA, 17 nt, artificial sequence
  misc_feature: oligonucleotide substrate
uugauaacaucaugcuc

SEQ ID NO: 2112 - RNA, 17 nt, artificial sequence
  misc_feature: oligonucleotide substrate
auaacaucaugcuccuc

SEQ ID NO: 2113 - RNA, 17 nt, artificial sequence
  misc_feature: oligonucleotide substrate
aacaucaugcuccucca

SEQ ID NO: 2114 - RNA, 17 nt, artificial sequence
  misc_feature: oligonucleotide substrate
cuccuccaacguaucag

SEQ ID NO: 2115 - RNA, 17 nt, artificial sequence
  misc_feature: oligonucleotide substrate
ccuccaacguaucaguu

SEQ ID NO: 2116 - RNA, 17 nt, artificial sequence
  misc_feature: oligonucleotide substrate
uccaacguaucaguugc

SEQ ID NO: 2117 - RNA, 17 nt, artificial sequence
  misc_feature: oligonucleotide substrate
acguaucaguugcacac

SEQ ID NO: 2118 - RNA, 17 nt, artificial sequence
  misc_feature: oligonucleotide substrate
uaucaguugcacacgau

SEQ ID NO: 2119 - RNA, 17 nt, artificial sequence
  misc_feature: oligonucleotide substrate
ucaguugcacacgaugc

SEQ ID NO: 2120 - RNA, 17 nt, artificial sequence
  misc_feature: oligonucleotide substrate
aguugcacacgaugcau

SEQ ID NO: 2121 - RNA, 17 nt, artificial sequence
  misc_feature: oligonucleotide substrate
ugcacacgaugcaucug

SEQ ID NO: 2122 - RNA, 17 nt, artificial sequence
  misc_feature: oligonucleotide substrate
cacacgaugcaucuggc

SEQ ID NO: 2123 - RNA, 17 nt, artificial sequence
  misc_feature: oligonucleotide substrate
cacgaugcaucuggcaa

SEQ ID NO: 2124 - RNA, 17 nt, artificial sequence
  misc_feature: oligonucleotide substrate
ugcaucuggcaaaaggg

SEQ ID NO: 2125 - RNA, 17 nt, artificial sequence
  misc_feature: oligonucleotide substrate
gcaaaaggguguacuac

SEQ ID NO: 2126 - RNA, 17 nt, artificial sequence
  misc_feature: oligonucleotide substrate
aaaaggguguacuaccu

SEQ ID NO: 2127 - RNA, 17 nt, artificial sequence
  misc_feature: oligonucleotide substrate
aaggguguacuaccuca

SEQ ID NO: 2128 - RNA, 17 nt, artificial sequence
  misc_feature: oligonucleotide substrate
gguguacuaccucaccc

SEQ ID NO: 2129 - RNA, 17 nt, artificial sequence
  misc_feature: oligonucleotide substrate
acuaccucacccgugac

SEQ ID NO: 2130 - RNA, 17 nt, artificial sequence
  misc_feature: oligonucleotide substrate
ccucacccgugacccca

SEQ ID NO: 2131 - RNA, 17 nt, artificial sequence
  misc_feature: oligonucleotide substrate
cacccgugaccccacca

SEQ ID NO: 2132 - RNA, 17 nt, artificial sequence
  misc_feature: oligonucleotide substrate
gugaccccaccaccccc

SEQ ID NO: 2133 - RNA, 17 nt, artificial sequence
  misc_feature: oligonucleotide substrate
accccaccaccccccuu

SEQ ID NO: 2134 - RNA, 17 nt, artificial sequence
  misc_feature: oligonucleotide substrate
ccccccuugcgcgggcu

SEQ ID NO: 2135 - RNA, 17 nt, artificial sequence
  misc_feature: oligonucleotide substrate
ccccuugcgcgggcugc

SEQ ID NO: 2136 - RNA, 17 nt, artificial sequence
  misc_feature: oligonucleotide substrate
uugcgcgggcugcgugg

SEQ ID NO: 2137 - RNA, 17 nt, artificial sequence
  misc_feature: oligonucleotide substrate
cgcgggcugcgugggag

SEQ ID NO: 2138 - RNA, 17 nt, artificial sequence
  misc_feature: oligonucleotide substrate
cgggcugcgugggagac

SEQ ID NO: 2139 - RNA, 17 nt, artificial sequence
  misc_feature: oligonucleotide substrate
cgugggagacagcuaga

SEQ ID NO: 2140 - RNA, 17 nt, artificial sequence
  misc_feature: oligonucleotide substrate
gggagacagcuagaagc

SEQ ID NO: 2141 - RNA, 17 nt, artificial sequence
  misc_feature: oligonucleotide substrate
agcuagaagcacuccag

SEQ ID NO: 2142 - RNA, 17 nt, artificial sequence
  misc_feature: oligonucleotide substrate
cuagaagcacuccaguc

SEQ ID NO: 2143 - RNA, 17 nt, artificial sequence
  misc_feature: oligonucleotide substrate
gcacuccagucaacucc

SEQ ID NO: 2144 - RNA, 17 nt, artificial sequence
  misc_feature: oligonucleotide substrate
uccagucaacuccuggc

SEQ ID NO: 2145 - RNA, 17 nt, artificial sequence
  misc_feature: oligonucleotide substrate
aacuccuggcuaggcaa

SEQ ID NO: 2146 - RNA, 17 nt, artificial sequence
  misc_feature: oligonucleotide substrate
cuggcuaggcaacauca

SEQ ID NO: 2147 - RNA, 17 nt, artificial sequence
  misc_feature: oligonucleotide substrate
gcuaggcaacaucauca

SEQ ID NO: 2148 - RNA, 17 nt, artificial sequence
  misc_feature: oligonucleotide substrate
uaggcaacaucaucaug

SEQ ID NO: 2149 - RNA, 17 nt, artificial sequence
  misc_feature: oligonucleotide substrate
gcaacaucaucauguuu

SEQ ID NO: 2150 - RNA, 17 nt, artificial sequence
  misc_feature: oligonucleotide substrate
acaucaucauguuugca

SEQ ID NO: 2151 - RNA, 17 nt, artificial sequence
  misc_feature: oligonucleotide substrate
aucaucauguuugcacc

SEQ ID NO: 2152 - RNA, 17 nt, artificial sequence
  misc_feature: oligonucleotide substrate
ucauguuugcacccacu

SEQ ID NO: 2153 - RNA, 17 nt, artificial sequence
  misc_feature: oligonucleotide substrate
auguuugcacccacucu

SEQ ID NO: 2154 - RNA, 17 nt, artificial sequence
  misc_feature: oligonucleotide substrate
uugcacccacucuaugg

SEQ ID NO: 2155 - RNA, 17 nt, artificial sequence
  misc_feature: oligonucleotide substrate
cccacucuauggguaag

SEQ ID NO: 2156 - RNA, 17 nt, artificial sequence
  misc_feature: oligonucleotide substrate
cucuauggguaaggaug

SEQ ID NO: 2157 - RNA, 17 nt, artificial sequence
  misc_feature: oligonucleotide substrate
ggguaaggaugauucug

SEQ ID NO: 2158 - RNA, 17 nt, artificial sequence
  misc_feature: oligonucleotide substrate
uaaggaugauucugaug

SEQ ID NO: 2159 - RNA, 17 nt, artificial sequence
  misc_feature: oligonucleotide substrate
ugauucugaugacucac

SEQ ID NO: 2160 - RNA, 17 nt, artificial sequence
  misc_feature: oligonucleotide substrate
uucugaugacucacuuc

SEQ ID NO: 2161 - RNA, 17 nt, artificial sequence
  misc_feature: oligonucleotide substrate
gaugacucacuucuucu

SEQ ID NO: 2162 - RNA, 17 nt, artificial sequence
  misc_feature: oligonucleotide substrate
ucuucuccauccuucua

SEQ ID NO: 2163 - RNA, 17 nt, artificial sequence
  misc_feature: oligonucleotide substrate
uccuucuagcccaggag

SEQ ID NO: 2164 - RNA, 17 nt, artificial sequence
  misc_feature: oligonucleotide substrate
gcccaggagcaacuuga

SEQ ID NO: 2165 - RNA, 17 nt, artificial sequence
  misc_feature: oligonucleotide substrate
caggagcaacuugagaa

SEQ ID NO: 2166 - RNA, 17 nt, artificial sequence
  misc_feature: oligonucleotide substrate
uugagaaagcccuagac

SEQ ID NO: 2167 - RNA, 17 nt, artificial sequence
  misc_feature: oligonucleotide substrate
agcccuagacugccaga

SEQ ID NO: 2168 - RNA, 17 nt, artificial sequence
  misc_feature: oligonucleotide substrate
ccuagacugccagaucu

SEQ ID NO: 2169 - RNA, 17 nt, artificial sequence
  misc_feature: oligonucleotide substrate
acugccagaucuacggg

SEQ ID NO: 2170 - RNA, 17 nt, artificial sequence
  misc_feature: oligonucleotide substrate
ccagaucuacggggcuu

SEQ ID NO: 2171 - RNA, 17 nt, artificial sequence
  misc_feature: oligonucleotide substrate
ucuacggggcuuguuac

SEQ ID NO: 2172 - RNA, 17 nt, artificial sequence
  misc_feature: oligonucleotide substrate
cggggcuuguuacucca

SEQ ID NO: 2173 - RNA, 17 nt, artificial sequence
  misc_feature: oligonucleotide substrate
ggcuuguuacuccauug

SEQ ID NO: 2174 - RNA, 17 nt, artificial sequence
  misc_feature: oligonucleotide substrate
guuacuccauugagcca

SEQ ID NO: 2175 - RNA, 17 nt, artificial sequence
  misc_feature: oligonucleotide substrate
uccauugagccacuuga

SEQ ID NO: 2176 - RNA, 17 nt, artificial sequence
  misc_feature: oligonucleotide substrate
auugagccacuugaccu

SEQ ID NO: 2177 - RNA, 17 nt, artificial sequence
  misc_feature: oligonucleotide substrate
gccacuugaccuaccuc

SEQ ID NO: 2178 - RNA, 17 nt, artificial sequence
  misc_feature: oligonucleotide substrate
cuugaccuaccucagau

SEQ ID NO: 2179 - RNA, 17 nt, artificial sequence
  misc_feature: oligonucleotide substrate
uaccucagaucauucag

SEQ ID NO: 2180 - RNA, 17 nt, artificial sequence
  misc_feature: oligonucleotide substrate
cucagaucauucagcga

SEQ ID NO: 2181 - RNA, 17 nt, artificial sequence
  misc_feature: oligonucleotide substrate
aucauucagcgacucca

SEQ ID NO: 2182 - RNA, 17 nt, artificial sequence
  misc_feature: oligonucleotide substrate
auucagcgacuccaugg

SEQ ID NO: 2183 - RNA, 17 nt, artificial sequence
  misc_feature: oligonucleotide substrate
gcgacuccauggucuua

SEQ ID NO: 2184 - RNA, 17 nt, artificial sequence
  misc_feature: oligonucleotide substrate
acuccauggucuuagcg

SEQ ID NO: 2185 - RNA, 17 nt, artificial sequence
  misc_feature: oligonucleotide substrate
uggucuuagcgcauuuu

SEQ ID NO: 2186 - RNA, 17 nt, artificial sequence
  misc_feature: oligonucleotide substrate
gucuuagcgcauuuuca

SEQ ID NO: 2187 - RNA, 17 nt, artificial sequence
  misc_feature: oligonucleotide substrate
cuuagcgcauuuucacu

SEQ ID NO: 2188 - RNA, 17 nt, artificial sequence
  misc_feature: oligonucleotide substrate
gcauuuucacuccauag

SEQ ID NO: 2189 - RNA, 17 nt, artificial sequence
  misc_feature: oligonucleotide substrate
uucacuccauaguuacu

SEQ ID NO: 2190 - RNA, 17 nt, artificial sequence
  misc_feature: oligonucleotide substrate
acuccauaguuacuccc

SEQ ID NO: 2191 - RNA, 17 nt, artificial sequence
  misc_feature: oligonucleotide substrate
ccauaguuacuccccag

SEQ ID NO: 2192 - RNA, 17 nt, artificial sequence
  misc_feature: oligonucleotide substrate
cuccccaggugaaauca

SEQ ID NO: 2193 - RNA, 17 nt, artificial sequence
  misc_feature: oligonucleotide substrate
caggugaaaucaauagg

SEQ ID NO: 2194 - RNA, 17 nt, artificial sequence
  misc_feature: oligonucleotide substrate
ugaaaucaauagggugg

SEQ ID NO: 2195 - RNA, 17 nt, artificial sequence
  misc_feature: oligonucleotide substrate
ucaauaggguggcauca

SEQ ID NO: 2196 - RNA, 17 nt, artificial sequence
  misc_feature: oligonucleotide substrate
auaggguggcaucaugc

SEQ ID NO: 2197 - RNA, 17 nt, artificial sequence
  misc_feature: oligonucleotide substrate
aggguggcaucaugccu

SEQ ID NO: 2198 - RNA, 17 nt, artificial sequence
  misc_feature: oligonucleotide substrate
guggcaucaugccucag

SEQ ID NO: 2199 - RNA, 17 nt, artificial sequence
  misc_feature: oligonucleotide substrate
ggcaucaugccucagga

SEQ ID NO: 2200 - RNA, 17 nt, artificial sequence
  misc_feature: oligonucleotide substrate
cucaggaaacuuggggu

SEQ ID NO: 2201 - RNA, 17 nt, artificial sequence
  misc_feature: oligonucleotide substrate
aacuugggguaccaccc

SEQ ID NO: 2202 - RNA, 17 nt, artificial sequence
  misc_feature: oligonucleotide substrate
cuugggguaccacccuu

SEQ ID NO: 2203 - RNA, 17 nt, artificial sequence
  misc_feature: oligonucleotide substrate
gggguaccacccuugcg

SEQ ID NO: 2204 - RNA, 17 nt, artificial sequence
  misc_feature: oligonucleotide substrate
ccacccuugcgaaccug

SEQ ID NO: 2205 - RNA, 17 nt, artificial sequence
  misc_feature: oligonucleotide substrate
ccuugcgaaccuggaga

SEQ ID NO: 2206 - RNA, 17 nt, artificial sequence
  misc_feature: oligonucleotide substrate
accuggagacaucgggc

SEQ ID NO: 2207 - RNA, 17 nt, artificial sequence
  misc_feature: oligonucleotide substrate
cuggagacaucgggcca

SEQ ID NO: 2208 - RNA, 17 nt, artificial sequence
  misc_feature: oligonucleotide substrate
gacaucgggccagaagu

SEQ ID NO: 2209 - RNA, 17 nt, artificial sequence
  misc_feature: oligonucleotide substrate
ggccagaaguguucgcg

SEQ ID NO: 2210 - RNA, 17 nt, artificial sequence
  misc_feature: oligonucleotide substrate
ccagaaguguucgcgcu

SEQ ID NO: 2211 - RNA, 17 nt, artificial sequence
  misc_feature: oligonucleotide substrate
aaguguucgcgcuaagc

SEQ ID NO: 2212 - RNA, 17 nt, artificial sequence
  misc_feature: oligonucleotide substrate
guguucgcgcuaagcua

SEQ ID NO: 2213 - RNA, 17 nt, artificial sequence
  misc_feature: oligonucleotide substrate
cgcgcuaagcuacuguc

SEQ ID NO: 2214 - RNA, 17 nt, artificial sequence
  misc_feature: oligonucleotide substrate
gcuaagcuacuguccca

SEQ ID NO: 2215 - RNA, 17 nt, artificial sequence
  misc_feature: oligonucleotide substrate
aagcuacugucccaggg

SEQ ID NO: 2216 - RNA, 17 nt, artificial sequence
  misc_feature: oligonucleotide substrate
gggggagggccgccacc

SEQ ID NO: 2217 - RNA, 17 nt, artificial sequence
  misc_feature: oligonucleotide substrate
ggagggccgccaccugu

SEQ ID NO: 2218 - RNA, 17 nt, artificial sequence
  misc_feature: oligonucleotide substrate
gggccgccaccuguggc

SEQ ID NO: 2219 - RNA, 17 nt, artificial sequence
  misc_feature: oligonucleotide substrate
cgccaccuguggcaggu

SEQ ID NO: 2220 - RNA, 17 nt, artificial sequence
  misc_feature: oligonucleotide substrate
caccuguggcagguacc

SEQ ID NO: 2221 - RNA, 17 nt, artificial sequence
  misc_feature: oligonucleotide substrate
uguggcagguaccucuu

SEQ ID NO: 2222 - RNA, 17 nt, artificial sequence
  misc_feature: oligonucleotide substrate
uggcagguaccucuuca

SEQ ID NO: 2223 - RNA, 17 nt, artificial sequence
  misc_feature: oligonucleotide substrate
ccucuucaacugggcag

SEQ ID NO: 2224 - RNA, 17 nt, artificial sequence
  misc_feature: oligonucleotide substrate
ucaacugggcaguaaag

SEQ ID NO: 2225 - RNA, 17 nt, artificial sequence
  misc_feature: oligonucleotide substrate
acugggcaguaaagacc

SEQ ID NO: 2226 - RNA, 17 nt, artificial sequence
  misc_feature: oligonucleotide substrate
caguaaagaccaaacuc

SEQ ID NO: 2227 - RNA, 17 nt, artificial sequence
  misc_feature: oligonucleotide substrate
aagaccaaacucaaacu

SEQ ID NO: 2228 - RNA, 17 nt, artificial sequence
  misc_feature: oligonucleotide substrate
aaacucaaacucacucc

SEQ ID NO: 2229 - RNA, 17 nt, artificial sequence
  misc_feature: oligonucleotide substrate
ucaaacucacuccaauc

SEQ ID NO: 2230 - RNA, 17 nt, artificial sequence
  misc_feature: oligonucleotide substrate
ucacuccaaucccagcu

SEQ ID NO: 2231 - RNA, 17 nt, artificial sequence
  misc_feature: oligonucleotide substrate
caaucccagcugcgucu

SEQ ID NO: 2232 - RNA, 17 nt, artificial sequence
  misc_feature: oligonucleotide substrate
ucccagcugcgucucag

SEQ ID NO: 2233 - RNA, 17 nt, artificial sequence
  misc_feature: oligonucleotide substrate
ccagcugcgucucaguu

SEQ ID NO: 2234 - RNA, 17 nt, artificial sequence
  misc_feature: oligonucleotide substrate
gcgucucaguuggacuu

SEQ ID NO: 2235 - RNA, 17 nt, artificial sequence
  misc_feature: oligonucleotide substrate
ucaguuggacuugucca

SEQ ID NO: 2236 - RNA, 17 nt, artificial sequence
  misc_feature: oligonucleotide substrate
uuggacuuguccaacug

SEQ ID NO: 2237 - RNA, 17 nt, artificial sequence
  misc_feature: oligonucleotide substrate
cuuguccaacugguucg

SEQ ID NO: 2238 - RNA, 17 nt, artificial sequence
  misc_feature: oligonucleotide substrate
uccaacugguucguugc

SEQ ID NO: 2239 - RNA, 17 nt, artificial sequence
  misc_feature: oligonucleotide substrate
acugguucguugcuggc

SEQ ID NO: 2240 - RNA, 17 nt, artificial sequence
  misc_feature: oligonucleotide substrate
gguucguugcuggcuac

SEQ ID NO: 2241 - RNA, 17 nt, artificial sequence
  misc_feature: oligonucleotide substrate
cguugcuggcuacagcg

SEQ ID NO: 2242 - RNA, 17 nt, artificial sequence
  misc_feature: oligonucleotide substrate
ugcuggcuacagcgggg

SEQ ID NO: 2243 - RNA, 17 nt, artificial sequence
  misc_feature: oligonucleotide substrate
uggcuacagcgggggag

SEQ ID NO: 2244 - RNA, 17 nt, artificial sequence
  misc_feature: oligonucleotide substrate
cgggggagacguguauc

SEQ ID NO: 2245 - RNA, 17 nt, artificial sequence
  misc_feature: oligonucleotide substrate
ggggagacguguaucac

SEQ ID NO: 2246 - RNA, 17 nt, artificial sequence
  misc_feature: oligonucleotide substrate
ggagacguguaucacag

SEQ ID NO: 2247 - RNA, 17 nt, artificial sequence
  misc_feature: oligonucleotide substrate
agacguguaucacagcc

SEQ ID NO: 2248 - RNA, 17 nt, artificial sequence
  misc_feature: oligonucleotide substrate
cguguaucacagccugu

SEQ ID NO: 2249 - RNA, 17 nt, artificial sequence
  misc_feature: oligonucleotide substrate
guaucacagccugucuc

SEQ ID NO: 2250 - RNA, 17 nt, artificial sequence
  misc_feature: oligonucleotide substrate
cacagccugucucgugc

SEQ ID NO: 2251 - RNA, 17 nt, artificial sequence
  misc_feature: oligonucleotide substrate
ccugucucgugcccgac

SEQ ID NO: 2252 - RNA, 17 nt, artificial sequence
  misc_feature: oligonucleotide substrate
ugucucgugcccgaccc

SEQ ID NO: 2253 - RNA, 17 nt, artificial sequence
  misc_feature: oligonucleotide substrate
cgugcccgaccccgcug

SEQ ID NO: 2254 - RNA, 17 nt, artificial sequence
  misc_feature: oligonucleotide substrate
ccgaccccgcugguuca

SEQ ID NO: 2255 - RNA, 17 nt, artificial sequence
  misc_feature: oligonucleotide substrate
ccccgcugguucaugcu

SEQ ID NO: 2256 - RNA, 17 nt, artificial sequence
  misc_feature: oligonucleotide substrate
gcugguucaugcuuugc

SEQ ID NO: 2257 - RNA, 17 nt, artificial sequence
  misc_feature: oligonucleotide substrate
ugguucaugcuuugccu

SEQ ID NO: 2258 - RNA, 17 nt, artificial sequence
  misc_feature: oligonucleotide substrate
caugcuuugccuacucc

SEQ ID NO: 2259 - RNA, 17 nt, artificial sequence
  misc_feature: oligonucleotide substrate
cuuugccuacuccuacu

SEQ ID NO: 2260 - RNA, 17 nt, artificial sequence
  misc_feature: oligonucleotide substrate
cuacuccuacucuccgu

SEQ ID NO: 2261 - RNA, 17 nt, artificial sequence
  misc_feature: oligonucleotide substrate
uacucuccguaggggua

SEQ ID NO: 2262 - RNA, 17 nt, artificial sequence
  misc_feature: oligonucleotide substrate
ccguagggguaggcauc

SEQ ID NO: 2263 - RNA, 17 nt, artificial sequence
  misc_feature: oligonucleotide substrate
agggguaggcaucuacc

SEQ ID NO: 2264 - RNA, 17 nt, artificial sequence
  misc_feature: oligonucleotide substrate
ggguaggcaucuaccug

SEQ ID NO: 2265 - RNA, 17 nt, artificial sequence
  misc_feature: oligonucleotide substrate
aggcaucuaccugcucc

SEQ ID NO: 2266 - RNA, 17 nt, artificial sequence
  misc_feature: oligonucleotide substrate
aucuaccugcuccccaa

SEQ ID NO: 2267 - RNA, 17 nt, artificial sequence
  misc_feature: oligonucleotide substrate
gcuccccaaccgaugaa

SEQ ID NO: 2268 - RNA, 17 nt, artificial sequence
  misc_feature: oligonucleotide substrate
cccaaccgaugaacagg

SEQ ID NO: 2269 - RNA, 17 nt, artificial sequence
  misc_feature: oligonucleotide substrate
accgaugaacagggagc

SEQ ID NO: 2270 - RNA, 17 nt, artificial sequence
  misc_feature: oligonucleotide substrate
aacagggagcuaaacac

SEQ ID NO: 2271 - RNA, 17 nt, artificial sequence
  misc_feature: oligonucleotide substrate
ggagcuaaacacuccag

SEQ ID NO: 2272 - RNA, 17 nt, artificial sequence
  misc_feature: oligonucleotide substrate
agcuaaacacuccaggc

SEQ ID NO: 2273 - RNA, 17 nt, artificial sequence
  misc_feature: oligonucleotide substrate
cacuccaggccaauagg

SEQ ID NO: 2274 - RNA, 17 nt, artificial sequence
  misc_feature: oligonucleotide substrate
ccaggccaauaggccau

SEQ ID NO: 2275 - RNA, 17 nt, artificial sequence
  misc_feature: oligonucleotide substrate
gccaauaggccaucccg

SEQ ID NO: 2276 - RNA, 17 nt, artificial sequence
  misc_feature: oligonucleotide substrate
aauaggccaucccguuu

SEQ ID NO: 2277 - RNA, 17 nt, artificial sequence
  misc_feature: oligonucleotide substrate
gccaucccguuuuuuuu

SEQ ID NO: 2278 - RNA, 17 nt, artificial sequence
  misc_feature: oligonucleotide substrate
aaaaaaaaacgggaugg

SEQ ID NO: 2279 - RNA, 17 nt, artificial sequence
  misc_feature: oligonucleotide substrate
aaaacgggauggccuau

SEQ ID NO: 2280 - RNA, 17 nt, artificial sequence
  misc_feature: oligonucleotide substrate
acgggauggccuauugg

SEQ ID NO: 2281 - RNA, 17 nt, artificial sequence
  misc_feature: oligonucleotide substrate
gauggccuauuggccug

SEQ ID NO: 2282 - RNA, 17 nt, artificial sequence
  misc_feature: oligonucleotide substrate
gccuauuggccuggagu

SEQ ID NO: 2283 - RNA, 17 nt, artificial sequence
  misc_feature: oligonucleotide substrate
ggccuggaguguuuagc

SEQ ID NO: 2284 - RNA, 17 nt, artificial sequence
  misc_feature: oligonucleotide substrate
ccuggaguguuuagcuc

SEQ ID NO: 2285 - RNA, 17 nt, artificial sequence
  misc_feature: oligonucleotide substrate
aguguuuagcucccugu

SEQ ID NO: 2286 - RNA, 17 nt, artificial sequence
  misc_feature: oligonucleotide substrate
agcucccuguucaucgg

SEQ ID NO: 2287 - RNA, 17 nt, artificial sequence
  misc_feature: oligonucleotide substrate
cccuguucaucgguugg

SEQ ID NO: 2288 - RNA, 17 nt, artificial sequence
  misc_feature: oligonucleotide substrate
guucaucgguuggggag

SEQ ID NO: 2289 - RNA, 17 nt, artificial sequence
  misc_feature: oligonucleotide substrate
guuggggagcagguaga

SEQ ID NO: 2290 - RNA, 17 nt, artificial sequence
  misc_feature: oligonucleotide substrate
gggagcagguagaugcc

SEQ ID NO: 2291 - RNA, 17 nt, artificial sequence
  misc_feature: oligonucleotide substrate
gcagguagaugccuacc

SEQ ID NO: 2292 - RNA, 17 nt, artificial sequence
  misc_feature: oligonucleotide substrate
agguagaugccuacccc

SEQ ID NO: 2293 - RNA, 17 nt, artificial sequence
  misc_feature: oligonucleotide substrate
agaugccuaccccuacg

SEQ ID NO: 2294 - RNA, 17 nt, artificial sequence
  misc_feature: oligonucleotide substrate
cuaccccuacggagagu

SEQ ID NO: 2295 - RNA, 17 nt, artificial sequence
  misc_feature: oligonucleotide substrate
uacggagaguaggagua

SEQ ID NO: 2296 - RNA, 17 nt, artificial sequence
  misc_feature: oligonucleotide substrate
gaguaggaguaggcaaa

SEQ ID NO: 2297 - RNA, 17 nt, artificial sequence
  misc_feature: oligonucleotide substrate
aggaguaggcaaagcau

SEQ ID NO: 2298 - RNA, 17 nt, artificial sequence
  misc_feature: oligonucleotide substrate
uaggcaaagcaugaacc

SEQ ID NO: 2299 - RNA, 17 nt, artificial sequence
  misc_feature: oligonucleotide substrate
ggcaaagcaugaaccag

SEQ ID NO: 2300 - RNA, 17 nt, artificial sequence
  misc_feature: oligonucleotide substrate
aagcaugaaccagcggg

SEQ ID NO: 2301 - RNA, 17 nt, artificial sequence
  misc_feature: oligonucleotide substrate
augaaccagcggggucg

SEQ ID NO: 2302 - RNA, 17 nt, artificial sequence
  misc_feature: oligonucleotide substrate
ccagcggggucgggcac

SEQ ID NO: 2303 - RNA, 17 nt, artificial sequence
  misc_feature: oligonucleotide substrate
ggggucgggcacgagac

SEQ ID NO: 2304 - RNA, 17 nt, artificial sequence
  misc_feature: oligonucleotide substrate
ggucgggcacgagacag

SEQ ID NO: 2305 - RNA, 17 nt, artificial sequence
  misc_feature: oligonucleotide substrate
ggcacgagacaggcugu

SEQ ID NO: 2306 - RNA, 17 nt, artificial sequence
  misc_feature: oligonucleotide substrate
cgagacaggcugugaua

SEQ ID NO: 2307 - RNA, 17 nt, artificial sequence
  misc_feature: oligonucleotide substrate
gacaggcugugauacac

SEQ ID NO: 2308 - RNA, 17 nt, artificial sequence
  misc_feature: oligonucleotide substrate
aggcugugauacacguc

SEQ ID NO: 2309 - RNA, 17 nt, artificial sequence
  misc_feature: oligonucleotide substrate
gcugugauacacgucuc

SEQ ID NO: 2310 - RNA, 17 nt, artificial sequence
  misc_feature: oligonucleotide substrate
ugugauacacgucuccc

SEQ ID NO: 2311 - RNA, 17 nt, artificial sequence
  misc_feature: oligonucleotide substrate
ugauacacgucuccccc

SEQ ID NO: 2312 - RNA, 17 nt, artificial sequence
  misc_feature: oligonucleotide substrate
ucucccccgcuguagcc

SEQ ID NO: 2313 - RNA, 17 nt, artificial sequence
  misc_feature: oligonucleotide substrate
cccccgcuguagccagc

SEQ ID NO: 2314 - RNA, 17 nt, artificial sequence
  misc_feature: oligonucleotide substrate
ccgcuguagccagcaac

SEQ ID NO: 2315 - RNA, 17 nt, artificial sequence
  misc_feature: oligonucleotide substrate
uguagccagcaacgaac

SEQ ID NO: 2316 - RNA, 17 nt, artificial sequence
  misc_feature: oligonucleotide substrate
agccagcaacgaaccag

SEQ ID NO: 2317 - RNA, 17 nt, artificial sequence
  misc_feature: oligonucleotide substrate
agcaacgaaccaguugg

SEQ ID NO: 2318 - RNA, 17 nt, artificial sequence
  misc_feature: oligonucleotide substrate
acgaaccaguuggacaa

SEQ ID NO: 2319 - RNA, 17 nt, artificial sequence
  misc_feature: oligonucleotide substrate
ccaguuggacaagucca

SEQ ID NO: 2320 - RNA, 17 nt, artificial sequence
  misc_feature: oligonucleotide substrate
uuggacaaguccaacug

SEQ ID NO: 2321 - RNA, 17 nt, artificial sequence
  misc_feature: oligonucleotide substrate
caaguccaacugagacg

SEQ ID NO: 2322 - RNA, 17 nt, artificial sequence
  misc_feature: oligonucleotide substrate
caacugagacgcagcug

SEQ ID NO: 2323 - RNA, 17 nt, artificial sequence
  misc_feature: oligonucleotide substrate
acugagacgcagcuggg

SEQ ID NO: 2324 - RNA, 17 nt, artificial sequence
  misc_feature: oligonucleotide substrate
gagacgcagcugggauu

SEQ ID NO: 2325 - RNA, 17 nt, artificial sequence
  misc_feature: oligonucleotide substrate
cagcugggauuggagug

SEQ ID NO: 2326 - RNA, 17 nt, artificial sequence
  misc_feature: oligonucleotide substrate
ggauuggagugaguuug

SEQ ID NO: 2327 - RNA, 17 nt, artificial sequence
  misc_feature: oligonucleotide substrate
uggagugaguuugaguu

SEQ ID NO: 2328 - RNA, 17 nt, artificial sequence
  misc_feature: oligonucleotide substrate
gaguuugaguuuggucu

SEQ ID NO: 2329 - RNA, 17 nt, artificial sequence
  misc_feature: oligonucleotide substrate
ugaguuuggucuuuacu

SEQ ID NO: 2330 - RNA, 17 nt, artificial sequence
  misc_feature: oligonucleotide substrate
uggucuuuacugcccag

SEQ ID NO: 2331 - RNA, 17 nt, artificial sequence
  misc_feature: oligonucleotide substrate
ucuuuacugcccaguug

SEQ ID NO: 2332 - RNA, 17 nt, artificial sequence
  misc_feature: oligonucleotide substrate
acugcccaguugaagag

SEQ ID NO: 2333 - RNA, 17 nt, artificial sequence
  misc_feature: oligonucleotide substrate
uugaagagguaccugcc

SEQ ID NO: 2334 - RNA, 17 nt, artificial sequence
  misc_feature: oligonucleotide substrate
gaagagguaccugccac

SEQ ID NO: 2335 - RNA, 17 nt, artificial sequence
  misc_feature: oligonucleotide substrate
agguaccugccacaggu

SEQ ID NO: 2336 - RNA, 17 nt, artificial sequence
  misc_feature: oligonucleotide substrate
uaccugccacagguggc

SEQ ID NO: 2337 - RNA, 17 nt, artificial sequence
  misc_feature: oligonucleotide substrate
ugccacagguggcggcc

SEQ ID NO: 2338 - RNA, 17 nt, artificial sequence
  misc_feature: oligonucleotide substrate
cacagguggcggcccuc

SEQ ID NO: 2339 - RNA, 17 nt, artificial sequence
  misc_feature: oligonucleotide substrate
agguggcggcccucccc

SEQ ID NO: 2340 - RNA, 17 nt, artificial sequence
  misc_feature: oligonucleotide substrate
ccccugggacaguagcu

SEQ ID NO: 2341 - RNA, 17 nt, artificial sequence
  misc_feature: oligonucleotide substrate
cugggacaguagcuuag

SEQ ID NO: 2342 - RNA, 17 nt, artificial sequence
  misc_feature: oligonucleotide substrate
ggacaguagcuuagcgc

SEQ ID NO: 2343 - RNA, 17 nt, artificial sequence
  misc_feature: oligonucleotide substrate
guagcuuagcgcgaaca

SEQ ID NO: 2344 - RNA, 17 nt, artificial sequence
  misc_feature: oligonucleotide substrate
agcuuagcgcgaacacu

SEQ ID NO: 2345 - RNA, 17 nt, artificial sequence
  misc_feature: oligonucleotide substrate
uagcgcgaacacuucug

SEQ ID NO: 2346 - RNA, 17 nt, artificial sequence
  misc_feature: oligonucleotide substrate
gcgcgaacacuucuggc

SEQ ID NO: 2347 - RNA, 17 nt, artificial sequence
  misc_feature: oligonucleotide substrate
cacuucuggcccgaugu

SEQ ID NO: 2348 - RNA, 17 nt, artificial sequence
  misc_feature: oligonucleotide substrate
cuggcccgaugucucca

SEQ ID NO: 2349 - RNA, 17 nt, artificial sequence
  misc_feature: oligonucleotide substrate
ggcccgaugucuccagg

SEQ ID NO: 2350 - RNA, 17 nt, artificial sequence
  misc_feature: oligonucleotide substrate
gucuccagguucgcaag

SEQ ID NO: 2351 - RNA, 17 nt, artificial sequence
  misc_feature: oligonucleotide substrate
ccagguucgcaagggug

SEQ ID NO: 2352 - RNA, 17 nt, artificial sequence
  misc_feature: oligonucleotide substrate
ucgcaagggugguaccc

SEQ ID NO: 2353 - RNA, 17 nt, artificial sequence
  misc_feature: oligonucleotide substrate
caagggugguaccccaa

SEQ ID NO: 2354 - RNA, 17 nt, artificial sequence
  misc_feature: oligonucleotide substrate
agggugguaccccaagu

SEQ ID NO: 2355 - RNA, 17 nt, artificial sequence
  misc_feature: oligonucleotide substrate
uaccccaaguuuccuga

SEQ ID NO: 2356 - RNA, 17 nt, artificial sequence
  misc_feature: oligonucleotide substrate
uuccugaggcaugaugc

SEQ ID NO: 2357 - RNA, 17 nt, artificial sequence
  misc_feature: oligonucleotide substrate
ccugaggcaugaugcca

SEQ ID NO: 2358 - RNA, 17 nt, artificial sequence
  misc_feature: oligonucleotide substrate
gaggcaugaugccaccc

SEQ ID NO: 2359 - RNA, 17 nt, artificial sequence
  misc_feature: oligonucleotide substrate
ggcaugaugccacccua

SEQ ID NO: 2360 - RNA, 17 nt, artificial sequence
  misc_feature: oligonucleotide substrate
augaugccacccuauug

SEQ ID NO: 2361 - RNA, 17 nt, artificial sequence
  misc_feature: oligonucleotide substrate
gccacccuauugauuuc

SEQ ID NO: 2362 - RNA, 17 nt, artificial sequence
  misc_feature: oligonucleotide substrate
cccuauugauuucaccu

SEQ ID NO: 2363 - RNA, 17 nt, artificial sequence
  misc_feature: oligonucleotide substrate
uugauuucaccugggga

SEQ ID NO: 2364 - RNA, 17 nt, artificial sequence
  misc_feature: oligonucleotide substrate
ccuggggaguaacuaug

SEQ ID NO: 2365 - RNA, 17 nt, artificial sequence
  misc_feature: oligonucleotide substrate
ggggaguaacuauggag

SEQ ID NO: 2366 - RNA, 17 nt, artificial sequence
  misc_feature: oligonucleotide substrate
gaguaacuauggaguga

SEQ ID NO: 2367 - RNA, 17 nt, artificial sequence
  misc_feature: oligonucleotide substrate
acuauggagugaaaaug

SEQ ID NO: 2368 - RNA, 17 nt, artificial sequence
  misc_feature: oligonucleotide substrate
gagugaaaaugcgcuaa

SEQ ID NO: 2369 - RNA, 17 nt, artificial sequence
  misc_feature: oligonucleotide substrate
gugaaaaugcgcuaaga

SEQ ID NO: 2370 - RNA, 17 nt, artificial sequence
  misc_feature: oligonucleotide substrate
gaaaaugcgcuaagacc

SEQ ID NO: 2371 - RNA, 17 nt, artificial sequence
  misc_feature: oligonucleotide substrate
gcgcuaagaccauggag

SEQ ID NO: 2372 - RNA, 17 nt, artificial sequence
  misc_feature: oligonucleotide substrate
cuaagaccauggagucg

SEQ ID NO: 2373 - RNA, 17 nt, artificial sequence
  misc_feature: oligonucleotide substrate
accauggagucgcugaa

SEQ ID NO: 2374 - RNA, 17 nt, artificial sequence
  misc_feature: oligonucleotide substrate
auggagucgcugaauga

SEQ ID NO: 2375 - RNA, 17 nt, artificial sequence
  misc_feature: oligonucleotide substrate
gucgcugaaugaucuga

SEQ ID NO: 2376 - RNA, 17 nt, artificial sequence
  misc_feature: oligonucleotide substrate
gcugaaugaucugaggu

SEQ ID NO: 2377 - RNA, 17 nt, artificial sequence
  misc_feature: oligonucleotide substrate
gaucugagguaggucaa

SEQ ID NO: 2378 - RNA, 17 nt, artificial sequence
  misc_feature: oligonucleotide substrate
ugagguaggucaagugg

SEQ ID NO: 2379 - RNA, 17 nt, artificial sequence
  misc_feature: oligonucleotide substrate
uaggucaaguggcucaa

SEQ ID NO: 2380 - RNA, 17 nt, artificial sequence
  misc_feature: oligonucleotide substrate
gucaaguggcucaaugg

SEQ ID NO: 2381 - RNA, 17 nt, artificial sequence
  misc_feature: oligonucleotide substrate
guggcucaauggaguaa

SEQ ID NO: 2382 - RNA, 17 nt, artificial sequence
  misc_feature: oligonucleotide substrate
ucaauggaguaacaagc

SEQ ID NO: 2383 - RNA, 17 nt, artificial sequence
  misc_feature: oligonucleotide substrate
auggaguaacaagcccc

SEQ ID NO: 2384 - RNA, 17 nt, artificial sequence
  misc_feature: oligonucleotide substrate
aguaacaagccccguag

SEQ ID NO: 2385 - RNA, 17 nt, artificial sequence
  misc_feature: oligonucleotide substrate
caagccccguagaucug

SEQ ID NO: 2386 - RNA, 17 nt, artificial sequence
  misc_feature: oligonucleotide substrate
ccccguagaucuggcag

SEQ ID NO: 2387 - RNA, 17 nt, artificial sequence
  misc_feature: oligonucleotide substrate
uagaucuggcagucuag

SEQ ID NO: 2388 - RNA, 17 nt, artificial sequence
  misc_feature: oligonucleotide substrate
aucuggcagucuagggc

SEQ ID NO: 2389 - RNA, 17 nt, artificial sequence
  misc_feature: oligonucleotide substrate
agucuagggcuuucuca

SEQ ID NO: 2390 - RNA, 17 nt, artificial sequence
  misc_feature: oligonucleotide substrate
uuucucaaguugcuccu

SEQ ID NO: 2391 - RNA, 17 nt, artificial sequence
  misc_feature: oligonucleotide substrate
cucaaguugcuccuggg

SEQ ID NO: 2392 - RNA, 17 nt, artificial sequence
  misc_feature: oligonucleotide substrate
gcuccugggcuagaagg

SEQ ID NO: 2393 - RNA, 17 nt, artificial sequence
  misc_feature: oligonucleotide substrate
cuagaaggauggagaag

SEQ ID NO: 2394 - RNA, 17 nt, artificial sequence
  misc_feature: oligonucleotide substrate
gagaagaagugagucau

SEQ ID NO: 2395 - RNA, 17 nt, artificial sequence
  misc_feature: oligonucleotide substrate
agaagugagucaucaga

SEQ ID NO: 2396 - RNA, 17 nt, artificial sequence
  misc_feature: oligonucleotide substrate
agugagucaucagaauc

SEQ ID NO: 2397 - RNA, 17 nt, artificial sequence
  misc_feature: oligonucleotide substrate
ucaucagaaucauccuu

SEQ ID NO: 2398 - RNA, 17 nt, artificial sequence
  misc_feature: oligonucleotide substrate
ucagaaucauccuuacc

SEQ ID NO: 2399 - RNA, 17 nt, artificial sequence
  misc_feature: oligonucleotide substrate
ucauccuuacccauaga

SEQ ID NO: 2400 - RNA, 17 nt, artificial sequence
  misc_feature: oligonucleotide substrate
ccuuacccauagagugg

SEQ ID NO: 2401 - RNA, 17 nt, artificial sequence
  misc_feature: oligonucleotide substrate
cccauagagugggugca

SEQ ID NO: 2402 - RNA, 17 nt, artificial sequence
  misc_feature: oligonucleotide substrate
uagagugggugcaaaca

SEQ ID NO: 2403 - RNA, 17 nt, artificial sequence
  misc_feature: oligonucleotide substrate
gagugggugcaaacaug

SEQ ID NO: 2404 - RNA, 17 nt, artificial sequence
  misc_feature: oligonucleotide substrate
gggugcaaacaugauga

SEQ ID NO: 2405 - RNA, 17 nt, artificial sequence
  misc_feature: oligonucleotide substrate
gugcaaacaugaugaug

SEQ ID NO: 2406 - RNA, 17 nt, artificial sequence
  misc_feature: oligonucleotide substrate
caaacaugaugauguug

SEQ ID NO: 2407 - RNA, 17 nt, artificial sequence
  misc_feature: oligonucleotide substrate
acaugaugauguugccu

SEQ ID NO: 2408 - RNA, 17 nt, artificial sequence
  misc_feature: oligonucleotide substrate
augaugauguugccuag

SEQ ID NO: 2409 - RNA, 17 nt, artificial sequence
  misc_feature: oligonucleotide substrate
augauguugccuagcca

SEQ ID NO: 2410 - RNA, 17 nt, artificial sequence
  misc_feature: oligonucleotide substrate
guugccuagccaggagu

SEQ ID NO: 2411 - RNA, 17 nt, artificial sequence
  misc_feature: oligonucleotide substrate
agccaggaguugacugg

SEQ ID NO: 2412 - RNA, 17 nt, artificial sequence
  misc_feature: oligonucleotide substrate
aggaguugacuggagug

SEQ ID NO: 2413 - RNA, 17 nt, artificial sequence
  misc_feature: oligonucleotide substrate
ugacuggagugcuucua

SEQ ID NO: 2414 - RNA, 17 nt, artificial sequence
  misc_feature: oligonucleotide substrate
acuggagugcuucuagc

SEQ ID NO: 2415 - RNA, 17 nt, artificial sequence
  misc_feature: oligonucleotide substrate
ugcuucuagcugucucc

SEQ ID NO: 2416 - RNA, 17 nt, artificial sequence
  misc_feature: oligonucleotide substrate
uucuagcugucucccac

SEQ ID NO: 2417 - RNA, 17 nt, artificial sequence
  misc_feature: oligonucleotide substrate
ugucucccacgcagccc

SEQ ID NO: 2418 - RNA, 17 nt, artificial sequence
  misc_feature: oligonucleotide substrate
ucucccacgcagcccgc

SEQ ID NO: 2419 - RNA, 17 nt, artificial sequence
  misc_feature: oligonucleotide substrate
cccacgcagcccgcgca

SEQ ID NO: 2420 - RNA, 17 nt, artificial sequence
  misc_feature: oligonucleotide substrate
cgcagcccgcgcaaggg

SEQ ID NO: 2421 - RNA, 17 nt, artificial sequence
  misc_feature: oligonucleotide substrate
cagcccgcgcaaggggg

SEQ ID NO: 2422 - RNA, 17 nt, artificial sequence
  misc_feature: oligonucleotide substrate
caagggggguggugggg

SEQ ID NO: 2423 - RNA, 17 nt, artificial sequence
  misc_feature: oligonucleotide substrate
gggggguggugggguca

SEQ ID NO: 2424 - RNA, 17 nt, artificial sequence
  misc_feature: oligonucleotide substrate
gugguggggucacgggu

SEQ ID NO: 2425 - RNA, 17 nt, artificial sequence
  misc_feature: oligonucleotide substrate
guggggucacgggugag

SEQ ID NO: 2426 - RNA, 17 nt, artificial sequence
  misc_feature: oligonucleotide substrate
ggucacgggugagguag

SEQ ID NO: 2427 - RNA, 17 nt, artificial sequence
  misc_feature: oligonucleotide substrate
cgggugagguaguacac

SEQ ID NO: 2428 - RNA, 17 nt, artificial sequence
  misc_feature: oligonucleotide substrate
gugagguaguacacccu

SEQ ID NO: 2429 - RNA, 17 nt, artificial sequence
  misc_feature: oligonucleotide substrate
gagguaguacacccuuu

SEQ ID NO: 2430 - RNA, 17 nt, artificial sequence
  misc_feature: oligonucleotide substrate
gguaguacacccuuuug

SEQ ID NO: 2431 - RNA, 17 nt, artificial sequence
  misc_feature: oligonucleotide substrate
acccuuuugccagaugc

SEQ ID NO: 2432 - RNA, 17 nt, artificial sequence
  misc_feature: oligonucleotide substrate
uuugccagaugcaucgu

SEQ ID NO: 2433 - RNA, 17 nt, artificial sequence
  misc_feature: oligonucleotide substrate
ugccagaugcaucgugu

SEQ ID NO: 2434 - RNA, 17 nt, artificial sequence
  misc_feature: oligonucleotide substrate
ccagaugcaucgugugc

SEQ ID NO: 2435 - RNA, 17 nt, artificial sequence
  misc_feature: oligonucleotide substrate
gaugcaucgugugcaac

SEQ ID NO: 2436 - RNA, 17 nt, artificial sequence
  misc_feature: oligonucleotide substrate
ugcaucgugugcaacug

SEQ ID NO: 2437 - RNA, 17 nt, artificial sequence
  misc_feature: oligonucleotide substrate
caucgugugcaacugau

SEQ ID NO: 2438 - RNA, 17 nt, artificial sequence
  misc_feature: oligonucleotide substrate
cgugugcaacugauacg

SEQ ID NO: 2439 - RNA, 17 nt, artificial sequence
  misc_feature: oligonucleotide substrate
ugcaacugauacguugg

SEQ ID NO: 2440 - RNA, 17 nt, artificial sequence
  misc_feature: oligonucleotide substrate
caacugauacguuggag

SEQ ID NO: 2441 - RNA, 17 nt, artificial sequence
  misc_feature: oligonucleotide substrate
acugauacguuggagga

SEQ ID NO: 2442 - RNA, 17 nt, artificial sequence
  misc_feature: oligonucleotide substrate
uuggaggagcaugaugu

SEQ ID NO: 2443 - RNA, 17 nt, artificial sequence
  misc_feature: oligonucleotide substrate
ggaggagcaugauguua

SEQ ID NO: 2444 - RNA, 17 nt, artificial sequence
  misc_feature: oligonucleotide substrate
ggagcaugauguuauca

SEQ ID NO: 2445 - RNA, 17 nt, artificial sequence
  misc_feature: oligonucleotide substrate
agcaugauguuaucaac

SEQ ID NO: 2446 - RNA, 17 nt, artificial sequence
  misc_feature: oligonucleotide substrate
augauguuaucaacucc

SEQ ID NO: 2447 - RNA, 17 nt, artificial sequence
  misc_feature: oligonucleotide substrate
uguuaucaacuccaagu

SEQ ID NO: 2448 - RNA, 17 nt, artificial sequence
  misc_feature: oligonucleotide substrate
aacuccaagucguauuc

SEQ ID NO: 2449 - RNA, 17 nt, artificial sequence
  misc_feature: oligonucleotide substrate
uccaagucguauuccgg

SEQ ID NO: 2450 - RNA, 17 nt, artificial sequence
  misc_feature: oligonucleotide substrate
caagucguauuccgguu

SEQ ID NO: 2451 - RNA, 17 nt, artificial sequence
  misc_feature: oligonucleotide substrate
guauuccgguuggggcg

SEQ ID NO: 2452 - RNA, 17 nt, artificial sequence
  misc_feature: oligonucleotide substrate
cgguuggggcggguccc

SEQ ID NO: 2453 - RNA, 17 nt, artificial sequence
  misc_feature: oligonucleotide substrate
uggggcggguccccggg

SEQ ID NO: 2454 - RNA, 17 nt, artificial sequence
  misc_feature: oligonucleotide substrate
cggggggggcagaguac

SEQ ID NO: 2455 - RNA, 17 nt, artificial sequence
  misc_feature: oligonucleotide substrate
ggggcagaguaccuagu

SEQ ID NO: 2456 - RNA, 17 nt, artificial sequence
  misc_feature: oligonucleotide substrate
ggcagaguaccuaguca

SEQ ID NO: 2457 - RNA, 17 nt, artificial sequence
  misc_feature: oligonucleotide substrate
aguaccuagucauagcc

SEQ ID NO: 2458 - RNA, 17 nt, artificial sequence
  misc_feature: oligonucleotide substrate
accuagucauagccucc

SEQ ID NO: 2459 - RNA, 17 nt, artificial sequence
  misc_feature: oligonucleotide substrate
uagucauagccuccgug

SEQ ID NO: 2460 - RNA, 17 nt, artificial sequence
  misc_feature: oligonucleotide substrate
uagccuccgugaagacu

SEQ ID NO: 2461 - RNA, 17 nt, artificial sequence
  misc_feature: oligonucleotide substrate
ccgugaagacucguagg

SEQ ID NO: 2462 - RNA, 17 nt, artificial sequence
  misc_feature: oligonucleotide substrate
gaagacucguaggcucg

SEQ ID NO: 2463 - RNA, 17 nt, artificial sequence
  misc_feature: oligonucleotide substrate
acucguaggcucgccgc

SEQ ID NO: 2464 - RNA, 17 nt, artificial sequence
  misc_feature: oligonucleotide substrate
guaggcucgccgcgucc

SEQ ID NO: 2465 - RNA, 17 nt, artificial sequence
  misc_feature: oligonucleotide substrate
ggcucgccgcguccucu

SEQ ID NO: 2466 - RNA, 17 nt, artificial sequence
  misc_feature: oligonucleotide substrate
cucgccgcguccucuug

SEQ ID NO: 2467 - RNA, 17 nt, artificial sequence
  misc_feature: oligonucleotide substrate
ccucuuggguccccgca

SEQ ID NO: 2468 - RNA, 17 nt, artificial sequence
  misc_feature: oligonucleotide substrate
ggguccccgcacuuuca

SEQ ID NO: 2469 - RNA, 17 nt, artificial sequence
  misc_feature: oligonucleotide substrate
guccccgcacuuucaca

SEQ ID NO: 2470 - RNA, 17 nt, artificial sequence
  misc_feature: oligonucleotide substrate
gcacuuucacagauaac

SEQ ID NO: 2471 - RNA, 17 nt, artificial sequence
  misc_feature: oligonucleotide substrate
uuucacagauaacgacc

SEQ ID NO: 2472 - RNA, 17 nt, artificial sequence
  misc_feature: oligonucleotide substrate
cacagauaacgaccagg

SEQ ID NO: 2473 - RNA, 17 nt, artificial sequence
  misc_feature: oligonucleotide substrate
agauaacgaccaggucg

SEQ ID NO: 2474 - RNA, 17 nt, artificial sequence
  misc_feature: oligonucleotide substrate
acgaccaggucgucucc

SEQ ID NO: 2475 - RNA, 17 nt, artificial sequence
  misc_feature: oligonucleotide substrate
accaggucgucuccaca

SEQ ID NO: 2476 - RNA, 17 nt, artificial sequence
  misc_feature: oligonucleotide substrate
ucgucuccacacacgag

SEQ ID NO: 2477 - RNA, 17 nt, artificial sequence
  misc_feature: oligonucleotide substrate
gucuccacacacgagca

SEQ ID NO: 2478 - RNA, 17 nt, artificial sequence
  misc_feature: oligonucleotide substrate
cuccacacacgagcauc

SEQ ID NO: 2479 - RNA, 17 nt, artificial sequence
  misc_feature: oligonucleotide substrate
acacacgagcaucgugc

SEQ ID NO: 2480 - RNA, 17 nt, artificial sequence
  misc_feature: oligonucleotide substrate
acacgagcaucgugcag

SEQ ID NO: 2481 - RNA, 17 nt, artificial sequence
  misc_feature: oligonucleotide substrate
cgagcaucgugcagucc

SEQ ID NO: 2482 - RNA, 17 nt, artificial sequence
  misc_feature: oligonucleotide substrate
agcaucgugcaguccug

SEQ ID NO: 2483 - RNA, 17 nt, artificial sequence
  misc_feature: oligonucleotide substrate
aucgugcaguccuggag

SEQ ID NO: 2484 - RNA, 17 nt, artificial sequence
  misc_feature: oligonucleotide substrate
guccuggagcuucgcag

SEQ ID NO: 2485 - RNA, 17 nt, artificial sequence
  misc_feature: oligonucleotide substrate
ggagcuucgcagcucga

SEQ ID NO: 2486 - RNA, 17 nt, artificial sequence
  misc_feature: oligonucleotide substrate
gcuucgcagcucgacag

SEQ ID NO: 2487 - RNA, 17 nt, artificial sequence
  misc_feature: oligonucleotide substrate
gcagcucgacaggccgc

SEQ ID NO: 2488 - RNA, 17 nt, artificial sequence
  misc_feature: oligonucleotide substrate
cucgacaggccgcagag

SEQ ID NO: 2489 - RNA, 17 nt, artificial sequence
  misc_feature: oligonucleotide substrate
gacaggccgcagaggcu

SEQ ID NO: 2490 - RNA, 17 nt, artificial sequence
  misc_feature: oligonucleotide substrate
ccgcagaggcuuucaag

SEQ ID NO: 2491 - RNA, 17 nt, artificial sequence
  misc_feature: oligonucleotide substrate
gcuuucaaguaacaugu

SEQ ID NO: 2492 - RNA, 17 nt, artificial sequence
  misc_feature: oligonucleotide substrate
uucaaguaacaugugag

SEQ ID NO: 2493 - RNA, 17 nt, artificial sequence
  misc_feature: oligonucleotide substrate
caaguaacaugugaggg

SEQ ID NO: 2494 - RNA, 17 nt, artificial sequence
  misc_feature: oligonucleotide substrate
aguaacaugugagggua

SEQ ID NO: 2495 - RNA, 17 nt, artificial sequence
  misc_feature: oligonucleotide substrate
augugaggguauuacca

SEQ ID NO: 2496 - RNA, 17 nt, artificial sequence
  misc_feature: oligonucleotide substrate
gugaggguauuaccaca

SEQ ID NO: 2497 - RNA, 17 nt, artificial sequence
  misc_feature: oligonucleotide substrate
aggguauuaccacagcu

SEQ ID NO: 2498 - RNA, 17 nt, artificial sequence
  misc_feature: oligonucleotide substrate
guauuaccacagcuggu

SEQ ID NO: 2499 - RNA, 17 nt, artificial sequence
  misc_feature: oligonucleotide substrate
uuaccacagcuggucgu

SEQ ID NO: 2500 - RNA, 17 nt, artificial sequence
  misc_feature: oligonucleotide substrate
cacagcuggucgucagc

SEQ ID NO: 2501 - RNA, 17 nt, artificial sequence
  misc_feature: oligonucleotide substrate
agcuggucgucagcacg

SEQ ID NO: 2502 - RNA, 17 nt, artificial sequence
  misc_feature: oligonucleotide substrate
ggucgucagcacgccgc

SEQ ID NO: 2503 - RNA, 17 nt, artificial sequence
  misc_feature: oligonucleotide substrate
ucgucagcacgccgcuc

SEQ ID NO: 2504 - RNA, 17 nt, artificial sequence
  misc_feature: oligonucleotide substrate
gucagcacgccgcucgc

SEQ ID NO: 2505 - RNA, 17 nt, artificial sequence
  misc_feature: oligonucleotide substrate
agcacgccgcucgcgcg

SEQ ID NO: 2506 - RNA, 17 nt, artificial sequence
  misc_feature: oligonucleotide substrate
cgccgcucgcgcggcac

SEQ ID NO: 2507 - RNA, 17 nt, artificial sequence
  misc_feature: oligonucleotide substrate
ccgcucgcgcggcaccg

SEQ ID NO: 2508 - RNA, 17 nt, artificial sequence
  misc_feature: oligonucleotide substrate
cucgcgcggcaccggcg

SEQ ID NO: 2509 - RNA, 17 nt, artificial sequence
  misc_feature: oligonucleotide substrate
cgcgcggcaccggcgau

SEQ ID NO: 2510 - RNA, 17 nt, artificial sequence
  misc_feature: oligonucleotide substrate
cggcaccggcgauaacc

SEQ ID NO: 2511 - RNA, 17 nt, artificial sequence
  misc_feature: oligonucleotide substrate
caccggcgauaaccgca

SEQ ID NO: 2512 - RNA, 17 nt, artificial sequence
  misc_feature: oligonucleotide substrate
cggcgauaaccgcaguu

SEQ ID NO: 2513 - RNA, 17 nt, artificial sequence
  misc_feature: oligonucleotide substrate
cgauaaccgcaguucug

SEQ ID NO: 2514 - RNA, 17 nt, artificial sequence
  misc_feature: oligonucleotide substrate
uaaccgcaguucugccc

SEQ ID NO: 2515 - RNA, 17 nt, artificial sequence
  misc_feature: oligonucleotide substrate
gcaguucugcccuuuug

SEQ ID NO: 2516 - RNA, 17 nt, artificial sequence
  misc_feature: oligonucleotide substrate
ccuuuugaauuagucag

SEQ ID NO: 2517 - RNA, 17 nt, artificial sequence
  misc_feature: oligonucleotide substrate
uugaauuagucagagga

SEQ ID NO: 2518 - RNA, 17 nt, artificial sequence
  misc_feature: oligonucleotide substrate
gucagaggacccccgau

SEQ ID NO: 2519 - RNA, 17 nt, artificial sequence
  misc_feature: oligonucleotide substrate
gacccccgauauaaagc

SEQ ID NO: 2520 - RNA, 17 nt, artificial sequence
  misc_feature: oligonucleotide substrate
cccccgauauaaagccg

SEQ ID NO: 2521 - RNA, 17 nt, artificial sequence
  misc_feature: oligonucleotide substrate
gauauaaagccgcucug

SEQ ID NO: 2522 - RNA, 17 nt, artificial sequence
  misc_feature: oligonucleotide substrate
auaaagccgcucuguga

SEQ ID NO: 2523 - RNA, 17 nt, artificial sequence
  misc_feature: oligonucleotide substrate
gccgcucugugagcgac

SEQ ID NO: 2524 - RNA, 17 nt, artificial sequence
  misc_feature: oligonucleotide substrate
cucugugagcgaccuua

SEQ ID NO: 2525 - RNA, 17 nt, artificial sequence
  misc_feature: oligonucleotide substrate
ugugagcgaccuuaugg

SEQ ID NO: 2526 - RNA, 17 nt, artificial sequence
  misc_feature: oligonucleotide substrate
gcgaccuuauggccugu

SEQ ID NO: 2527 - RNA, 17 nt, artificial sequence
  misc_feature: oligonucleotide substrate
accuuauggccugucug

SEQ ID NO: 2528 - RNA, 17 nt, artificial sequence
  misc_feature: oligonucleotide substrate
uauggccugucuggcuu

SEQ ID NO: 2529 - RNA, 17 nt, artificial sequence
  misc_feature: oligonucleotide substrate
ccugucuggcuucgggg

SEQ ID NO: 2530 - RNA, 17 nt, artificial sequence
  misc_feature: oligonucleotide substrate
cuucgggggccaaguca

SEQ ID NO: 2531 - RNA, 17 nt, artificial sequence
  misc_feature: oligonucleotide substrate
ggggccaagucacaaca

SEQ ID NO: 2532 - RNA, 17 nt, artificial sequence
  misc_feature: oligonucleotide substrate
gccaagucacaacauug

SEQ ID NO: 2533 - RNA, 17 nt, artificial sequence
  misc_feature: oligonucleotide substrate
aagucacaacauuggua

SEQ ID NO: 2534 - RNA, 17 nt, artificial sequence
  misc_feature: oligonucleotide substrate
gucacaacauugguaaa

SEQ ID NO: 2535 - RNA, 17 nt, artificial sequence
  misc_feature: oligonucleotide substrate
caacauugguaaauuga

SEQ ID NO: 2536 - RNA, 17 nt, artificial sequence
  misc_feature: oligonucleotide substrate
auugguaaauugacucc

SEQ ID NO: 2537 - RNA, 17 nt, artificial sequence
  misc_feature: oligonucleotide substrate
guaaauugacuccucga

SEQ ID NO: 2538 - RNA, 17 nt, artificial sequence
  misc_feature: oligonucleotide substrate
acuccucgacacggaug

SEQ ID NO: 2539 - RNA, 17 nt, artificial sequence
  misc_feature: oligonucleotide substrate
uccucgacacggauguc

SEQ ID NO: 2540 - RNA, 17 nt, artificial sequence
  misc_feature: oligonucleotide substrate
cgacacggaugucacuc

SEQ ID NO: 2541 - RNA, 17 nt, artificial sequence
  misc_feature: oligonucleotide substrate
acacggaugucacucuc

SEQ ID NO: 2542 - RNA, 17 nt, artificial sequence
  misc_feature: oligonucleotide substrate
cggaugucacucucggu

SEQ ID NO: 2543 - RNA, 17 nt, artificial sequence
  misc_feature: oligonucleotide substrate
cacucucggugacuguu

SEQ ID NO: 2544 - RNA, 17 nt, artificial sequence
  misc_feature: oligonucleotide substrate
ucucggugacuguugag

SEQ ID NO: 2545 - RNA, 17 nt, artificial sequence
  misc_feature: oligonucleotide substrate
cggugacuguugagucg

SEQ ID NO: 2546 - RNA, 17 nt, artificial sequence
  misc_feature: oligonucleotide substrate
acuguugagucgaaaca

SEQ ID NO: 2547 - RNA, 17 nt, artificial sequence
  misc_feature: oligonucleotide substrate
gagucgaaacagcgggu

SEQ ID NO: 2548 - RNA, 17 nt, artificial sequence
  misc_feature: oligonucleotide substrate
ucgaaacagcggguguc

SEQ ID NO: 2549 - RNA, 17 nt, artificial sequence
  misc_feature: oligonucleotide substrate
aacagcgggugucauau

SEQ ID NO: 2550 - RNA, 17 nt, artificial sequence
  misc_feature: oligonucleotide substrate
cagcgggugucauaugc

SEQ ID NO: 2551 - RNA, 17 nt, artificial sequence
  misc_feature: oligonucleotide substrate
cgggugucauaugcaaa

SEQ ID NO: 2552 - RNA, 17 nt, artificial sequence
  misc_feature: oligonucleotide substrate
ggugucauaugcaaagc

SEQ ID NO: 2553 - RNA, 17 nt, artificial sequence
  misc_feature: oligonucleotide substrate
ugucauaugcaaagccc

SEQ ID NO: 2554 - RNA, 17 nt, artificial sequence
  misc_feature: oligonucleotide substrate
uaugcaaagcccauagg

SEQ ID NO: 2555 - RNA, 17 nt, artificial sequence
  misc_feature: oligonucleotide substrate
caaagcccauagggcau

SEQ ID NO: 2556 - RNA, 17 nt, artificial sequence
  misc_feature: oligonucleotide substrate
cccauagggcauuucuu

SEQ ID NO: 2557 - RNA, 17 nt, artificial sequence
  misc_feature: oligonucleotide substrate
cauagggcauuucuuug

SEQ ID NO: 2558 - RNA, 17 nt, artificial sequence
  misc_feature: oligonucleotide substrate
uuucuuugauuuccagg

SEQ ID NO: 2559 - RNA, 17 nt, artificial sequence
  misc_feature: oligonucleotide substrate
auuuccaggcauucacc

SEQ ID NO: 2560 - RNA, 17 nt, artificial sequence
  misc_feature: oligonucleotide substrate
uuccaggcauucaccag

SEQ ID NO: 2561 - RNA, 17 nt, artificial sequence
  misc_feature: oligonucleotide substrate
aggcauucaccaggaac

SEQ ID NO: 2562 - RNA, 17 nt, artificial sequence
  misc_feature: oligonucleotide substrate
caccaggaacucaaccc

SEQ ID NO: 2563 - RNA, 17 nt, artificial sequence
  misc_feature: oligonucleotide substrate
ggaacucaacccgcugc

SEQ ID NO: 2564 - RNA, 17 nt, artificial sequence
  misc_feature: oligonucleotide substrate
cucaacccgcugcccag

SEQ ID NO: 2565 - RNA, 17 nt, artificial sequence
  misc_feature: oligonucleotide substrate
aacccgcugcccaggag

SEQ ID NO: 2566 - RNA, 17 nt, artificial sequence
  misc_feature: oligonucleotide substrate
ccaggagaguacuggaa

SEQ ID NO: 2567 - RNA, 17 nt, artificial sequence
  misc_feature: oligonucleotide substrate
aggagaguacuggaauc

SEQ ID NO: 2568 - RNA, 17 nt, artificial sequence
  misc_feature: oligonucleotide substrate
guacuggaauccguaug

SEQ ID NO: 2569 - RNA, 17 nt, artificial sequence
  misc_feature: oligonucleotide substrate
uggaauccguaugaaga

SEQ ID NO: 2570 - RNA, 17 nt, artificial sequence
  misc_feature: oligonucleotide substrate
gaauccguaugaagagc

SEQ ID NO: 2571 - RNA, 17 nt, artificial sequence
  misc_feature: oligonucleotide substrate
uaugaagagcccaucac

SEQ ID NO: 2572 - RNA, 17 nt, artificial sequence
  misc_feature: oligonucleotide substrate
aagagcccaucacggcc

SEQ ID NO: 2573 - RNA, 17 nt, artificial sequence
  misc_feature: oligonucleotide substrate
agcccaucacggccuga

SEQ ID NO: 2574 - RNA, 17 nt, artificial sequence
  misc_feature: oligonucleotide substrate
ccaucacggccugagga

SEQ ID NO: 2575 - RNA, 17 nt, artificial sequence
  misc_feature: oligonucleotide substrate
gaggaaggguggagacc

SEQ ID NO: 2576 - RNA, 17 nt, artificial sequence
  misc_feature: oligonucleotide substrate
ggguggagaccacgucg

SEQ ID NO: 2577 - RNA, 17 nt, artificial sequence
  misc_feature: oligonucleotide substrate
uggagaccacgucguaa

SEQ ID NO: 2578 - RNA, 17 nt, artificial sequence
  misc_feature: oligonucleotide substrate
gagaccacgucguaaag

SEQ ID NO: 2579 - RNA, 17 nt, artificial sequence
  misc_feature: oligonucleotide substrate
accacgucguaaagggc

SEQ ID NO: 2580 - RNA, 17 nt, artificial sequence
  misc_feature: oligonucleotide substrate
cguaaagggccauuuuc

SEQ ID NO: 2581 - RNA, 17 nt, artificial sequence
  misc_feature: oligonucleotide substrate
aaagggccauuuucucg

SEQ ID NO: 2582 - RNA, 17 nt, artificial sequence
  misc_feature: oligonucleotide substrate
auuuucucgcacacacg

SEQ ID NO: 2583 - RNA, 17 nt, artificial sequence
  misc_feature: oligonucleotide substrate
uuucucgcacacacgaa

SEQ ID NO: 2584 - RNA, 17 nt, artificial sequence
  misc_feature: oligonucleotide substrate
ucucgcacacacgaacc

SEQ ID NO: 2585 - RNA, 17 nt, artificial sequence
  misc_feature: oligonucleotide substrate
ucgcacacacgaacccc

SEQ ID NO: 2586 - RNA, 17 nt, artificial sequence
  misc_feature: oligonucleotide substrate
acacacgaacccccaag

SEQ ID NO: 2587 - RNA, 17 nt, artificial sequence
  misc_feature: oligonucleotide substrate
acccccaagucugggaa

SEQ ID NO: 2588 - RNA, 17 nt, artificial sequence
  misc_feature: oligonucleotide substrate
gucugggaacacgauaa

SEQ ID NO: 2589 - RNA, 17 nt, artificial sequence
  misc_feature: oligonucleotide substrate
cugggaacacgauaagg

SEQ ID NO: 2590 - RNA, 17 nt, artificial sequence
  misc_feature: oligonucleotide substrate
ggaacacgauaaggcga

SEQ ID NO: 2591 - RNA, 17 nt, artificial sequence
  misc_feature: oligonucleotide substrate
acgauaaggcgagcugg

SEQ ID NO: 2592 - RNA, 17 nt, artificial sequence
  misc_feature: oligonucleotide substrate
uaaggcgagcuggcuug

SEQ ID NO: 2593 - RNA, 17 nt, artificial sequence
  misc_feature: oligonucleotide substrate
gcgagcuggcuugcggc

SEQ ID NO: 2594 - RNA, 17 nt, artificial sequence
  misc_feature: oligonucleotide substrate
gcuggcuugcggccucc

SEQ ID NO: 2595 - RNA, 17 nt, artificial sequence
  misc_feature: oligonucleotide substrate
ggcuugcggccuccuuu

SEQ ID NO: 2596 - RNA, 17 nt, artificial sequence
  misc_feature: oligonucleotide substrate
uuucucugguuggacgc

SEQ ID NO: 2597 - RNA, 17 nt, artificial sequence
  misc_feature: oligonucleotide substrate
cugguuggacgcagaaa

SEQ ID NO: 2598 - RNA, 17 nt, artificial sequence
  misc_feature: oligonucleotide substrate
gguuggacgcagaaaac

SEQ ID NO: 2599 - RNA, 17 nt, artificial sequence
  misc_feature: oligonucleotide substrate
cgcagaaaaccucauuu

SEQ ID NO: 2600 - RNA, 17 nt, artificial sequence
  misc_feature: oligonucleotide substrate
aaaaccucauuuuuugc

SEQ ID NO: 2601 - RNA, 17 nt, artificial sequence
  misc_feature: oligonucleotide substrate
cauuuuuugccaugaug

SEQ ID NO: 2602 - RNA, 17 nt, artificial sequence
  misc_feature: oligonucleotide substrate
uuuuugccaugauggug

SEQ ID NO: 2603 - RNA, 17 nt, artificial sequence
  misc_feature: oligonucleotide substrate
uugccaugaugguggua

SEQ ID NO: 2604 - RNA, 17 nt, artificial sequence
  misc_feature: oligonucleotide substrate
ccaugauggugguauca

SEQ ID NO: 2605 - RNA, 17 nt, artificial sequence
  misc_feature: oligonucleotide substrate
ugauggugguaucaauu

SEQ ID NO: 2606 - RNA, 17 nt, artificial sequence
  misc_feature: oligonucleotide substrate
auggugguaucaauugg

SEQ ID NO: 2607 - RNA, 17 nt, artificial sequence
  misc_feature: oligonucleotide substrate
ugguaucaauugguguc

SEQ ID NO: 2608 - RNA, 17 nt, artificial sequence
  misc_feature: oligonucleotide substrate
aucaauuggugucucag

SEQ ID NO: 2609 - RNA, 17 nt, artificial sequence
  misc_feature: oligonucleotide substrate
caauuggugucucagug

SEQ ID NO: 2610 - RNA, 17 nt, artificial sequence
  misc_feature: oligonucleotide substrate
gugucucagugucuucc

SEQ ID NO: 2611 - RNA, 17 nt, artificial sequence
  misc_feature: oligonucleotide substrate
gucucagugucuuccag

SEQ ID NO: 2612 - RNA, 17 nt, artificial sequence
  misc_feature: oligonucleotide substrate
gucuuccagcaaguccu

SEQ ID NO: 2613 - RNA, 17 nt, artificial sequence
  misc_feature: oligonucleotide substrate
uccagcaaguccuucca

SEQ ID NO: 2614 - RNA, 17 nt, artificial sequence
  misc_feature: oligonucleotide substrate
guccuuccacacggagc

SEQ ID NO: 2615 - RNA, 17 nt, artificial sequence
  misc_feature: oligonucleotide substrate
ccuuccacacggagcgg

SEQ ID NO: 2616 - RNA, 17 nt, artificial sequence
  misc_feature: oligonucleotide substrate
cacacggagcggaugug

SEQ ID NO: 2617 - RNA, 17 nt, artificial sequence
  misc_feature: oligonucleotide substrate
cggagcggaugugguug

SEQ ID NO: 2618 - RNA, 17 nt, artificial sequence
  misc_feature: oligonucleotide substrate
gagcggaugugguugac

SEQ ID NO: 2619 - RNA, 17 nt, artificial sequence
  misc_feature: oligonucleotide substrate
cggaugugguugacggc

SEQ ID NO: 2620 - RNA, 17 nt, artificial sequence
  misc_feature: oligonucleotide substrate
ugugguugacggccccg

SEQ ID NO: 2621 - RNA, 17 nt, artificial sequence
  misc_feature: oligonucleotide substrate
gguugacggccccgcug

SEQ ID NO: 2622 - RNA, 17 nt, artificial sequence
  misc_feature: oligonucleotide substrate
acggccccgcuggauag

SEQ ID NO: 2623 - RNA, 17 nt, artificial sequence
  misc_feature: oligonucleotide substrate
cccgcuggauagguucc

SEQ ID NO: 2624 - RNA, 17 nt, artificial sequence
  misc_feature: oligonucleotide substrate
cuggauagguuccggac

SEQ ID NO: 2625 - RNA, 17 nt, artificial sequence
  misc_feature: oligonucleotide substrate
gguuccggacguccuuu

SEQ ID NO: 2626 - RNA, 17 nt, artificial sequence
  misc_feature: oligonucleotide substrate
uuccggacguccuuugc

SEQ ID NO: 2627 - RNA, 17 nt, artificial sequence
  misc_feature: oligonucleotide substrate
cguccuuugccccauaa

SEQ ID NO: 2628 - RNA, 17 nt, artificial sequence
  misc_feature: oligonucleotide substrate
uuugccccauaaccaaa

SEQ ID NO: 2629 - RNA, 17 nt, artificial sequence
  misc_feature: oligonucleotide substrate
gccccauaaccaaauuu

SEQ ID NO: 2630 - RNA, 17 nt, artificial sequence
  misc_feature: oligonucleotide substrate
auaaccaaauuuggacc

SEQ ID NO: 2631 - RNA, 17 nt, artificial sequence
  misc_feature: oligonucleotide substrate
aaauuuggaccuggccg

SEQ ID NO: 2632 - RNA, 17 nt, artificial sequence
  misc_feature: oligonucleotide substrate
uggaccuggccgaaugu

SEQ ID NO: 2633 - RNA, 17 nt, artificial sequence
  misc_feature: oligonucleotide substrate
cuggccgaauguggggg

SEQ ID NO: 2634 - RNA, 17 nt, artificial sequence
  misc_feature: oligonucleotide substrate
ggccgaaugugggggcg

SEQ ID NO: 2635 - RNA, 17 nt, artificial sequence
  misc_feature: oligonucleotide substrate
augugggggcgucaguc

SEQ ID NO: 2636 - RNA, 17 nt, artificial sequence
  misc_feature: oligonucleotide substrate
gugggggcgucagucug

SEQ ID NO: 2637 - RNA, 17 nt, artificial sequence
  misc_feature: oligonucleotide substrate
gggcgucagucugcagg

SEQ ID NO: 2638 - RNA, 17 nt, artificial sequence
  misc_feature: oligonucleotide substrate
gucagucugcaggcuuc

SEQ ID NO: 2639 - RNA, 17 nt, artificial sequence
  misc_feature: oligonucleotide substrate
gucugcaggcuuccucu

SEQ ID NO: 2640 - RNA, 17 nt, artificial sequence
  misc_feature: oligonucleotide substrate
cuuccucuacggauaga

SEQ ID NO: 2641 - RNA, 17 nt, artificial sequence
  misc_feature: oligonucleotide substrate
cucuacggauagaaguu

SEQ ID NO: 2642 - RNA, 17 nt, artificial sequence
  misc_feature: oligonucleotide substrate
ggauagaaguuuagccu

SEQ ID NO: 2643 - RNA, 17 nt, artificial sequence
  misc_feature: oligonucleotide substrate
gaaguuuagccuuaacu

SEQ ID NO: 2644 - RNA, 17 nt, artificial sequence
  misc_feature: oligonucleotide substrate
uagccuuaacuguggac

SEQ ID NO: 2645 - RNA, 17 nt, artificial sequence
  misc_feature: oligonucleotide substrate
ccuuaacuguggacgcc

SEQ ID NO: 2646 - RNA, 17 nt, artificial sequence
  misc_feature: oligonucleotide substrate
aacuguggacgccuucg

SEQ ID NO: 2647 - RNA, 17 nt, artificial sequence
  misc_feature: oligonucleotide substrate
cuguggacgccuucgcc

SEQ ID NO: 2648 - RNA, 17 nt, artificial sequence
  misc_feature: oligonucleotide substrate
acgccuucgccuucauc

SEQ ID NO: 2649 - RNA, 17 nt, artificial sequence
  misc_feature: oligonucleotide substrate
ucgccuucaucuccuug

SEQ ID NO: 2650 - RNA, 17 nt, artificial sequence
  misc_feature: oligonucleotide substrate
cuccuugagcacguccc

SEQ ID NO: 2651 - RNA, 17 nt, artificial sequence
  misc_feature: oligonucleotide substrate
ccuugagcacgucccgg

SEQ ID NO: 2652 - RNA, 17 nt, artificial sequence
  misc_feature: oligonucleotide substrate
uugagcacgucccggua

SEQ ID NO: 2653 - RNA, 17 nt, artificial sequence
  misc_feature: oligonucleotide substrate
acgucccgguagugguc

SEQ ID NO: 2654 - RNA, 17 nt, artificial sequence
  misc_feature: oligonucleotide substrate
ucccgguaguggucguc

SEQ ID NO: 2655 - RNA, 17 nt, artificial sequence
  misc_feature: oligonucleotide substrate
cgguaguggucguccag

SEQ ID NO: 2656 - RNA, 17 nt, artificial sequence
  misc_feature: oligonucleotide substrate
uaguggucguccaggac

SEQ ID NO: 2657 - RNA, 17 nt, artificial sequence
  misc_feature: oligonucleotide substrate
cguccaggacuugcagu

SEQ ID NO: 2658 - RNA, 17 nt, artificial sequence
  misc_feature: oligonucleotide substrate
caggacuugcagucugu

SEQ ID NO: 2659 - RNA, 17 nt, artificial sequence
  misc_feature: oligonucleotide substrate
gacuugcagucugucaa

SEQ ID NO: 2660 - RNA, 17 nt, artificial sequence
  misc_feature: oligonucleotide substrate
ugcagucugucaaaggu

SEQ ID NO: 2661 - RNA, 17 nt, artificial sequence
  misc_feature: oligonucleotide substrate
ugucaaaggugaccuuc

SEQ ID NO: 2662 - RNA, 17 nt, artificial sequence
  misc_feature: oligonucleotide substrate
caaaggugaccuucuuc

SEQ ID NO: 2663 - RNA, 17 nt, artificial sequence
  misc_feature: oligonucleotide substrate
cuucuucugccgcuggc

SEQ ID NO: 2664 - RNA, 17 nt, artificial sequence
  misc_feature: oligonucleotide substrate
cuucugccgcuggcuug

SEQ ID NO: 2665 - RNA, 17 nt, artificial sequence
  misc_feature: oligonucleotide substrate
ugccgcuggcuugcgcu

SEQ ID NO: 2666 - RNA, 17 nt, artificial sequence
  misc_feature: oligonucleotide substrate
gcuggcuugcgcugcga

SEQ ID NO: 2667 - RNA, 17 nt, artificial sequence
  misc_feature: oligonucleotide substrate
uggcuugcgcugcgaga

SEQ ID NO: 2668 - RNA, 17 nt, artificial sequence
  misc_feature: oligonucleotide substrate
cuugcgcugcgagaugu

SEQ ID NO: 2669 - RNA, 17 nt, artificial sequence
  misc_feature: oligonucleotide substrate
gcugcgagauguuguag

SEQ ID NO: 2670 - RNA, 17 nt, artificial sequence
  misc_feature: oligonucleotide substrate
ugcgagauguuguagcg

SEQ ID NO: 2671 - RNA, 17 nt, artificial sequence
  misc_feature: oligonucleotide substrate
gagauguuguagcguag

SEQ ID NO: 2672 - RNA, 17 nt, artificial sequence
  misc_feature: oligonucleotide substrate
auguuguagcguagacc

SEQ ID NO: 2673 - RNA, 17 nt, artificial sequence
  misc_feature: oligonucleotide substrate
guuguagcguagaccau

SEQ ID NO: 2674 - RNA, 17 nt, artificial sequence
  misc_feature: oligonucleotide substrate
uagcguagaccauguug

SEQ ID NO: 2675 - RNA, 17 nt, artificial sequence
  misc_feature: oligonucleotide substrate
cguagaccauguugugg

SEQ ID NO: 2676 - RNA, 17 nt, artificial sequence
  misc_feature: oligonucleotide substrate
uagaccauguuguggug

SEQ ID NO: 2677 - RNA, 17 nt, artificial sequence
  misc_feature: oligonucleotide substrate
accauguuguggugacg

SEQ ID NO: 2678 - RNA, 17 nt, artificial sequence
  misc_feature: oligonucleotide substrate
auguuguggugacgcag

SEQ ID NO: 2679 - RNA, 17 nt, artificial sequence
  misc_feature: oligonucleotide substrate
uuguggugacgcagcaa

SEQ ID NO: 2680 - RNA, 17 nt, artificial sequence
  misc_feature: oligonucleotide substrate
guggugacgcagcaaag

SEQ ID NO: 2681 - RNA, 17 nt, artificial sequence
  misc_feature: oligonucleotide substrate
gugacgcagcaaagagu

SEQ ID NO: 2682 - RNA, 17 nt, artificial sequence
  misc_feature: oligonucleotide substrate
agcaaagaguugcucaa

SEQ ID NO: 2683 - RNA, 17 nt, artificial sequence
  misc_feature: oligonucleotide substrate
aaagaguugcucaacgc

SEQ ID NO: 2684 - RNA, 17 nt, artificial sequence
  misc_feature: oligonucleotide substrate
guugcucaacgcguuga

SEQ ID NO: 2685 - RNA, 17 nt, artificial sequence
  misc_feature: oligonucleotide substrate
ugcucaacgcguugaug

SEQ ID NO: 2686 - RNA, 17 nt, artificial sequence
  misc_feature: oligonucleotide substrate
cucaacgcguugauggg

SEQ ID NO: 2687 - RNA, 17 nt, artificial sequence
  misc_feature: oligonucleotide substrate
acgcguugaugggcaac

SEQ ID NO: 2688 - RNA, 17 nt, artificial sequence
  misc_feature: oligonucleotide substrate
guugaugggcaacuugc

SEQ ID NO: 2689 - RNA, 17 nt, artificial sequence
  misc_feature: oligonucleotide substrate
gaugggcaacuugcuuu

SEQ ID NO: 2690 - RNA, 17 nt, artificial sequence
  misc_feature: oligonucleotide substrate
ggcaacuugcuuuccuc

SEQ ID NO: 2691 - RNA, 17 nt, artificial sequence
  misc_feature: oligonucleotide substrate
uuuccuccgcagcgcau

SEQ ID NO: 2692 - RNA, 17 nt, artificial sequence
  misc_feature: oligonucleotide substrate
ccuccgcagcgcauggc

SEQ ID NO: 2693 - RNA, 17 nt, artificial sequence
  misc_feature: oligonucleotide substrate
uccgcagcgcauggcgu

SEQ ID NO: 2694 - RNA, 17 nt, artificial sequence
  misc_feature: oligonucleotide substrate
cgcagcgcauggcguga

SEQ ID NO: 2695 - RNA, 17 nt, artificial sequence
  misc_feature: oligonucleotide substrate
agcgcauggcgugauca

SEQ ID NO: 2696 - RNA, 17 nt, artificial sequence
  misc_feature: oligonucleotide substrate
cgcauggcgugaucagg

SEQ ID NO: 2697 - RNA, 17 nt, artificial sequence
  misc_feature: oligonucleotide substrate
auggcgugaucagggcg

SEQ ID NO: 2698 - RNA, 17 nt, artificial sequence
  misc_feature: oligonucleotide substrate
ugaucagggcgcccguc

SEQ ID NO: 2699 - RNA, 17 nt, artificial sequence
  misc_feature: oligonucleotide substrate
aucagggcgcccgucca

SEQ ID NO: 2700 - RNA, 17 nt, artificial sequence
  misc_feature: oligonucleotide substrate
gggcgcccguccaugug

SEQ ID NO: 2701 - RNA, 17 nt, artificial sequence
  misc_feature: oligonucleotide substrate
gcccguccauguguagg

SEQ ID NO: 2702 - RNA, 17 nt, artificial sequence
  misc_feature: oligonucleotide substrate
ccguccauguguaggac

SEQ ID NO: 2703 - RNA, 17 nt, artificial sequence
  misc_feature: oligonucleotide substrate
guccauguguaggacau

SEQ ID NO: 2704 - RNA, 17 nt, artificial sequence
  misc_feature: oligonucleotide substrate
uguguaggacaucgagc

SEQ ID NO: 2705 - RNA, 17 nt, artificial sequence
  misc_feature: oligonucleotide substrate
uguaggacaucgagcag

SEQ ID NO: 2706 - RNA, 17 nt, artificial sequence
  misc_feature: oligonucleotide substrate
gacaucgagcagcagac

SEQ ID NO: 2707 - RNA, 17 nt, artificial sequence
  misc_feature: oligonucleotide substrate
aucgagcagcagacgac

SEQ ID NO: 2708 - RNA, 17 nt, artificial sequence
  misc_feature: oligonucleotide substrate
agcagcagacgacaucc

SEQ ID NO: 2709 - RNA, 17 nt, artificial sequence
  misc_feature: oligonucleotide substrate
agcagacgacauccucg

SEQ ID NO: 2710 - RNA, 17 nt, artificial sequence
  misc_feature: oligonucleotide substrate
cagacgacauccucgcc

SEQ ID NO: 2711 - RNA, 17 nt, artificial sequence
  misc_feature: oligonucleotide substrate
acauccucgccagccuc

SEQ ID NO: 2712 - RNA, 17 nt, artificial sequence
  misc_feature: oligonucleotide substrate
ccucgccagccucuucg

SEQ ID NO: 2713 - RNA, 17 nt, artificial sequence
  misc_feature: oligonucleotide substrate
gccucuucgcucacggu

SEQ ID NO: 2714 - RNA, 17 nt, artificial sequence
  misc_feature: oligonucleotide substrate
cuucgcucacgguagac

SEQ ID NO: 2715 - RNA, 17 nt, artificial sequence
  misc_feature: oligonucleotide substrate
cgcucacgguagaccaa

SEQ ID NO: 2716 - RNA, 17 nt, artificial sequence
  misc_feature: oligonucleotide substrate
cacgguagaccaagacc

SEQ ID NO: 2717 - RNA, 17 nt, artificial sequence
  misc_feature: oligonucleotide substrate
agaccaagacccgucgc

SEQ ID NO: 2718 - RNA, 17 nt, artificial sequence
  misc_feature: oligonucleotide substrate
caagacccgucgcugag

SEQ ID NO: 2719 - RNA, 17 nt, artificial sequence
  misc_feature: oligonucleotide substrate
gacccgucgcugagauc

SEQ ID NO: 2720 - RNA, 17 nt, artificial sequence
  misc_feature: oligonucleotide substrate
ucgcugagaucgggauc

SEQ ID NO: 2721 - RNA, 17 nt, artificial sequence
  misc_feature: oligonucleotide substrate
agaucgggaucccccgg

SEQ ID NO: 2722 - RNA, 17 nt, artificial sequence
  misc_feature: oligonucleotide substrate
aucccccggcucccccu

SEQ ID NO: 2723 - RNA, 17 nt, artificial sequence
  misc_feature: oligonucleotide substrate
aagggggggcauagagg

SEQ ID NO: 2724 - RNA, 17 nt, artificial sequence
  misc_feature: oligonucleotide substrate
gggggggcauagaggag

SEQ ID NO: 2725 - RNA, 17 nt, artificial sequence
  misc_feature: oligonucleotide substrate
auagaggaguacgacuc

SEQ ID NO: 2726 - RNA, 17 nt, artificial sequence
  misc_feature: oligonucleotide substrate
agaggaguacgacucaa

SEQ ID NO: 2727 - RNA, 17 nt, artificial sequence
  misc_feature: oligonucleotide substrate
ggaguacgacucaacgu

SEQ ID NO: 2728 - RNA, 17 nt, artificial sequence
  misc_feature: oligonucleotide substrate
acgacucaacgucggau

SEQ ID NO: 2729 - RNA, 17 nt, artificial sequence
  misc_feature: oligonucleotide substrate
gacucaacgucggaucc

SEQ ID NO: 2730 - RNA, 17 nt, artificial sequence
  misc_feature: oligonucleotide substrate
aacgucggauccugcgu

SEQ ID NO: 2731 - RNA, 17 nt, artificial sequence
  misc_feature: oligonucleotide substrate
cggauccugcgucaccg

SEQ ID NO: 2732 - RNA, 17 nt, artificial sequence
  misc_feature: oligonucleotide substrate
gauccugcgucaccguc

SEQ ID NO: 2733 - RNA, 17 nt, artificial sequence
  misc_feature: oligonucleotide substrate
ccugcgucaccgucauu

SEQ ID NO: 2734 - RNA, 17 nt, artificial sequence
  misc_feature: oligonucleotide substrate
gcgucaccgucauugga

SEQ ID NO: 2735 - RNA, 17 nt, artificial sequence
  misc_feature: oligonucleotide substrate
ucaccgucauuggaggu

SEQ ID NO: 2736 - RNA, 17 nt, artificial sequence
  misc_feature: oligonucleotide substrate
cauuggaggucuggucg

SEQ ID NO: 2737 - RNA, 17 nt, artificial sequence
  misc_feature: oligonucleotide substrate
gaggucuggucgggggg

SEQ ID NO: 2738 - RNA, 17 nt, artificial sequence
  misc_feature: oligonucleotide substrate
cggggggggcgguugcc

SEQ ID NO: 2739 - RNA, 17 nt, artificial sequence
  misc_feature: oligonucleotide substrate
ggggggcgguugccgua

SEQ ID NO: 2740 - RNA, 17 nt, artificial sequence
  misc_feature: oligonucleotide substrate
gggcgguugccguaccu

SEQ ID NO: 2741 - RNA, 17 nt, artificial sequence
  misc_feature: oligonucleotide substrate
cgguugccguaccucua

SEQ ID NO: 2742 - RNA, 17 nt, artificial sequence
  misc_feature: oligonucleotide substrate
guugccguaccucuauc

SEQ ID NO: 2743 - RNA, 17 nt, artificial sequence
  misc_feature: oligonucleotide substrate
guaccucuaucagcggc

SEQ ID NO: 2744 - RNA, 17 nt, artificial sequence
  misc_feature: oligonucleotide substrate
cucuaucagcggccgau

SEQ ID NO: 2745 - RNA, 17 nt, artificial sequence
  misc_feature: oligonucleotide substrate
uaucagcggccgaugau

SEQ ID NO: 2746 - RNA, 17 nt, artificial sequence
  misc_feature: oligonucleotide substrate
agcggccgaugauucag

SEQ ID NO: 2747 - RNA, 17 nt, artificial sequence
  misc_feature: oligonucleotide substrate
ggccgaugauucagagc

SEQ ID NO: 2748 - RNA, 17 nt, artificial sequence
  misc_feature: oligonucleotide substrate
gauucagagcugccgaa

SEQ ID NO: 2749 - RNA, 17 nt, artificial sequence
  misc_feature: oligonucleotide substrate
ucagagcugccgaaggu

SEQ ID NO: 2750 - RNA, 17 nt, artificial sequence
  misc_feature: oligonucleotide substrate
ugccgaaggucuuugug

SEQ ID NO: 2751 - RNA, 17 nt, artificial sequence
  misc_feature: oligonucleotide substrate
aggucuuuguggcgagc

SEQ ID NO: 2752 - RNA, 17 nt, artificial sequence
  misc_feature: oligonucleotide substrate
ucuuuguggcgagcucc

SEQ ID NO: 2753 - RNA, 17 nt, artificial sequence
  misc_feature: oligonucleotide substrate
uguggcgagcuccgcca

SEQ ID NO: 2754 - RNA, 17 nt, artificial sequence
  misc_feature: oligonucleotide substrate
cgagcuccgccaaggca

SEQ ID NO: 2755 - RNA, 17 nt, artificial sequence
  misc_feature: oligonucleotide substrate
ccgccaaggcagaagac

SEQ ID NO: 2756 - RNA, 17 nt, artificial sequence
  misc_feature: oligonucleotide substrate
ggcagaagacacggugg

SEQ ID NO: 2757 - RNA, 17 nt, artificial sequence
  misc_feature: oligonucleotide substrate
cagaagacacgguggac

SEQ ID NO: 2758 - RNA, 17 nt, artificial sequence
  misc_feature: oligonucleotide substrate
aagacacgguggacucu

SEQ ID NO: 2759 - RNA, 17 nt, artificial sequence
  misc_feature: oligonucleotide substrate
cacgguggacucuguca

SEQ ID NO: 2760 - RNA, 17 nt, artificial sequence
  misc_feature: oligonucleotide substrate
uggacucugucagaaca

SEQ ID NO: 2761 - RNA, 17 nt, artificial sequence
  misc_feature: oligonucleotide substrate
cugucagaacaaccguc

SEQ ID NO: 2762 - RNA, 17 nt, artificial sequence
  misc_feature: oligonucleotide substrate
ucagaacaaccguccuc

SEQ ID NO: 2763 - RNA, 17 nt, artificial sequence
  misc_feature: oligonucleotide substrate
gaacaaccguccucuuc

SEQ ID NO: 2764 - RNA, 17 nt, artificial sequence
  misc_feature: oligonucleotide substrate
cuuccuccguggaggug

SEQ ID NO: 2765 - RNA, 17 nt, artificial sequence
  misc_feature: oligonucleotide substrate
ccguggaggugguauug

SEQ ID NO: 2766 - RNA, 17 nt, artificial sequence
  misc_feature: oligonucleotide substrate
uggaggugguauuggag

SEQ ID NO: 2767 - RNA, 17 nt, artificial sequence
  misc_feature: oligonucleotide substrate
gaggugguauuggaggg

SEQ ID NO: 2768 - RNA, 17 nt, artificial sequence
  misc_feature: oligonucleotide substrate
uuggaggggccuuggca

SEQ ID NO: 2769 - RNA, 17 nt, artificial sequence
  misc_feature: oligonucleotide substrate
gggccuuggcagguggc

SEQ ID NO: 2770 - RNA, 17 nt, artificial sequence
  misc_feature: oligonucleotide substrate
cuuggcagguggcaaug

SEQ ID NO: 2771 - RNA, 17 nt, artificial sequence
  misc_feature: oligonucleotide substrate
ggcagguggcaaugggc

SEQ ID NO: 2772 - RNA, 17 nt, artificial sequence
  misc_feature: oligonucleotide substrate
agguggcaaugggcacc

SEQ ID NO: 2773 - RNA, 17 nt, artificial sequence
  misc_feature: oligonucleotide substrate
ggcaaugggcacccgug

SEQ ID NO: 2774 - RNA, 17 nt, artificial sequence
  misc_feature: oligonucleotide substrate
caaugggcacccgugua

SEQ ID NO: 2775 - RNA, 17 nt, artificial sequence
  misc_feature: oligonucleotide substrate
gggcacccguguaccac

SEQ ID NO: 2776 - RNA, 17 nt, artificial sequence
  misc_feature: oligonucleotide substrate
gcacccguguaccaccg

SEQ ID NO: 2777 - RNA, 17 nt, artificial sequence
  misc_feature: oligonucleotide substrate
acccguguaccaccgga

SEQ ID NO: 2778 - RNA, 17 nt, artificial sequence
  misc_feature: oligonucleotide substrate
cguguaccaccggaggg

SEQ ID NO: 2779 - RNA, 17 nt, artificial sequence
  misc_feature: oligonucleotide substrate
ccggagggacguagucu

SEQ ID NO: 2780 - RNA, 17 nt, artificial sequence
  misc_feature: oligonucleotide substrate
ggagggacguagucugg

SEQ ID NO: 2781 - RNA, 17 nt, artificial sequence
  misc_feature: oligonucleotide substrate
gggacguagucuggguc

SEQ ID NO: 2782 - RNA, 17 nt, artificial sequence
  misc_feature: oligonucleotide substrate
uagucugggucuuucca

SEQ ID NO: 2783 - RNA, 17 nt, artificial sequence
  misc_feature: oligonucleotide substrate
uuuccagggcucuagua

SEQ ID NO: 2784 - RNA, 17 nt, artificial sequence
  misc_feature: oligonucleotide substrate
gggcucuaguaguggag

SEQ ID NO: 2785 - RNA, 17 nt, artificial sequence
  misc_feature: oligonucleotide substrate
cucuaguaguggagggu

SEQ ID NO: 2786 - RNA, 17 nt, artificial sequence
  misc_feature: oligonucleotide substrate
aguggaggguuguaauc

SEQ ID NO: 2787 - RNA, 17 nt, artificial sequence
  misc_feature: oligonucleotide substrate
ggaggguuguaauccgg

SEQ ID NO: 2788 - RNA, 17 nt, artificial sequence
  misc_feature: oligonucleotide substrate
ggguuguaauccgggcg

SEQ ID NO: 2789 - RNA, 17 nt, artificial sequence
  misc_feature: oligonucleotide substrate
uaauccgggcgugccca

SEQ ID NO: 2790 - RNA, 17 nt, artificial sequence
  misc_feature: oligonucleotide substrate
auccgggcgugcccaua

SEQ ID NO: 2791 - RNA, 17 nt, artificial sequence
  misc_feature: oligonucleotide substrate
ccgggcgugcccauaug

SEQ ID NO: 2792 - RNA, 17 nt, artificial sequence
  misc_feature: oligonucleotide substrate
gcgugcccauaugggua

SEQ ID NO: 2793 - RNA, 17 nt, artificial sequence
  misc_feature: oligonucleotide substrate
gugcccauauggguaac

SEQ ID NO: 2794 - RNA, 17 nt, artificial sequence
  misc_feature: oligonucleotide substrate
ccauauggguaacgcug

SEQ ID NO: 2795 - RNA, 17 nt, artificial sequence
  misc_feature: oligonucleotide substrate
uauggguaacgcugaag

SEQ ID NO: 2796 - RNA, 17 nt, artificial sequence
  misc_feature: oligonucleotide substrate
uggguaacgcugaagga

SEQ ID NO: 2797 - RNA, 17 nt, artificial sequence
  misc_feature: oligonucleotide substrate
ugaaggaaacuucuugg

SEQ ID NO: 2798 - RNA, 17 nt, artificial sequence
  misc_feature: oligonucleotide substrate
cuucuuggauuuccgca

SEQ ID NO: 2799 - RNA, 17 nt, artificial sequence
  misc_feature: oligonucleotide substrate
ggauuuccgcaggaucu

SEQ ID NO: 2800 - RNA, 17 nt, artificial sequence
  misc_feature: oligonucleotide substrate
uccgcaggaucuccgcc

SEQ ID NO: 2801 - RNA, 17 nt, artificial sequence
  misc_feature: oligonucleotide substrate
ggaucuccgccggaaug

SEQ ID NO: 2802 - RNA, 17 nt, artificial sequence
  misc_feature: oligonucleotide substrate
ccgccggaauggacacc

SEQ ID NO: 2803 - RNA, 17 nt, artificial sequence
  misc_feature: oligonucleotide substrate
cggaauggacaccucuc

SEQ ID NO: 2804 - RNA, 17 nt, artificial sequence
  misc_feature: oligonucleotide substrate
gaauggacaccucucuc

SEQ ID NO: 2805 - RNA, 17 nt, artificial sequence
  misc_feature: oligonucleotide substrate
ucucucucauccuccuc

SEQ ID NO: 2806 - RNA, 17 nt, artificial sequence
  misc_feature: oligonucleotide substrate
ccuccuccgcucgaagc

SEQ ID NO: 2807 - RNA, 17 nt, artificial sequence
  misc_feature: oligonucleotide substrate
cgcucgaagcgggucaa

SEQ ID NO: 2808 - RNA, 17 nt, artificial sequence
  misc_feature: oligonucleotide substrate
cgaagcgggucaaaaga

SEQ ID NO: 2809 - RNA, 17 nt, artificial sequence
  misc_feature: oligonucleotide substrate
ucaaaagaguccagggu

SEQ ID NO: 2810 - RNA, 17 nt, artificial sequence
  misc_feature: oligonucleotide substrate
aguccaggguaacuacc

SEQ ID NO: 2811 - RNA, 17 nt, artificial sequence
  misc_feature: oligonucleotide substrate
ccaggguaacuaccuua

SEQ ID NO: 2812 - RNA, 17 nt, artificial sequence
  misc_feature: oligonucleotide substrate
ggguaacuaccuuauuc

SEQ ID NO: 2813 - RNA, 17 nt, artificial sequence
  misc_feature: oligonucleotide substrate
acuaccuuauucucuga

SEQ ID NO: 2814 - RNA, 17 nt, artificial sequence
  misc_feature: oligonucleotide substrate
auucucugacuccacgc

SEQ ID NO: 2815 - RNA, 17 nt, artificial sequence
  misc_feature: oligonucleotide substrate
cugacuccacgcgagug

SEQ ID NO: 2816 - RNA, 17 nt, artificial sequence
  misc_feature: oligonucleotide substrate
gacuccacgcgagugau

SEQ ID NO: 2817 - RNA, 17 nt, artificial sequence
  misc_feature: oligonucleotide substrate
ccacgcgagugauguua

SEQ ID NO: 2818 - RNA, 17 nt, artificial sequence
  misc_feature: oligonucleotide substrate
cgcgagugauguuaccg

SEQ ID NO: 2819 - RNA, 17 nt, artificial sequence
  misc_feature: oligonucleotide substrate
cgagugauguuaccgcc

SEQ ID NO: 2820 - RNA, 17 nt, artificial sequence
  misc_feature: oligonucleotide substrate
gugauguuaccgcccau

SEQ ID NO: 2821 - RNA, 17 nt, artificial sequence
  misc_feature: oligonucleotide substrate
auguuaccgcccaucuc

SEQ ID NO: 2822 - RNA, 17 nt, artificial sequence
  misc_feature: oligonucleotide substrate
uaccgcccaucuccugc

SEQ ID NO: 2823 - RNA, 17 nt, artificial sequence
  misc_feature: oligonucleotide substrate
caucuccugccgccaca

SEQ ID NO: 2824 - RNA, 17 nt, artificial sequence
  misc_feature: oligonucleotide substrate
cuccugccgccacagga

SEQ ID NO: 2825 - RNA, 17 nt, artificial sequence
  misc_feature: oligonucleotide substrate
cugccgccacaggaggu

SEQ ID NO: 2826 - RNA, 17 nt, artificial sequence
  misc_feature: oligonucleotide substrate
cacaggagguuggccuc

SEQ ID NO: 2827 - RNA, 17 nt, artificial sequence
  misc_feature: oligonucleotide substrate
ggagguuggccucgaug

SEQ ID NO: 2828 - RNA, 17 nt, artificial sequence
  misc_feature: oligonucleotide substrate
uggccucgaugagguca

SEQ ID NO: 2829 - RNA, 17 nt, artificial sequence
  misc_feature: oligonucleotide substrate
ucgaugaggucaaaguc

SEQ ID NO: 2830 - RNA, 17 nt, artificial sequence
  misc_feature: oligonucleotide substrate
aggucaaagucugggga

SEQ ID NO: 2831 - RNA, 17 nt, artificial sequence
  misc_feature: oligonucleotide substrate
ucuggggagucauauug

SEQ ID NO: 2832 - RNA, 17 nt, artificial sequence
  misc_feature: oligonucleotide substrate
ggggagucauauugggu

SEQ ID NO: 2833 - RNA, 17 nt, artificial sequence
  misc_feature: oligonucleotide substrate
ggagucauauuggguaa

SEQ ID NO: 2834 - RNA, 17 nt, artificial sequence
  misc_feature: oligonucleotide substrate
cauauuggguaauguau

SEQ ID NO: 2835 - RNA, 17 nt, artificial sequence
  misc_feature: oligonucleotide substrate
auuggguaauguauguc

SEQ ID NO: 2836 - RNA, 17 nt, artificial sequence
  misc_feature: oligonucleotide substrate
uggguaauguaugucgc

SEQ ID NO: 2837 - RNA, 17 nt, artificial sequence
  misc_feature: oligonucleotide substrate
gguaauguaugucgccu

SEQ ID NO: 2838 - RNA, 17 nt, artificial sequence
  misc_feature: oligonucleotide substrate
uaauguaugucgccuuc

SEQ ID NO: 2839 - RNA, 17 nt, artificial sequence
  misc_feature: oligonucleotide substrate
uguaugucgccuucgaa

SEQ ID NO: 2840 - RNA, 17 nt, artificial sequence
  misc_feature: oligonucleotide substrate
cgaagaaggcgcagaca

SEQ ID NO: 2841 - RNA, 17 nt, artificial sequence
  misc_feature: oligonucleotide substrate
aagaaggcgcagacagc

SEQ ID NO: 2842 - RNA, 17 nt, artificial sequence
  misc_feature: oligonucleotide substrate
aggcgcagacagcuggc

SEQ ID NO: 2843 - RNA, 17 nt, artificial sequence
  misc_feature: oligonucleotide substrate
cgcagacagcuggcuag

SEQ ID NO: 2844 - RNA, 17 nt, artificial sequence
  misc_feature: oligonucleotide substrate
gacagcuggcuagcuga

SEQ ID NO: 2845 - RNA, 17 nt, artificial sequence
  misc_feature: oligonucleotide substrate
gcuggcuagcugaggag

SEQ ID NO: 2846 - RNA, 17 nt, artificial sequence
  misc_feature: oligonucleotide substrate
gcugaggagcuggccaa

SEQ ID NO: 2847 - RNA, 17 nt, artificial sequence
  misc_feature: oligonucleotide substrate
aggagcuggccaaggag

SEQ ID NO: 2848 - RNA, 17 nt, artificial sequence
  misc_feature: oligonucleotide substrate
ggggggagacccccugg

SEQ ID NO: 2849 - RNA, 17 nt, artificial sequence
  misc_feature: oligonucleotide substrate
acccccuggccagccua

SEQ ID NO: 2850 - RNA, 17 nt, artificial sequence
  misc_feature: oligonucleotide substrate
ccuggccagccuacgcu

SEQ ID NO: 2851 - RNA, 17 nt, artificial sequence
  misc_feature: oligonucleotide substrate
gccagccuacgcuuagc

SEQ ID NO: 2852 - RNA, 17 nt, artificial sequence
  misc_feature: oligonucleotide substrate
cagccuacgcuuagccg

SEQ ID NO: 2853 - RNA, 17 nt, artificial sequence
  misc_feature: oligonucleotide substrate
uacgcuuagccgucucu

SEQ ID NO: 2854 - RNA, 17 nt, artificial sequence
  misc_feature: oligonucleotide substrate
gcuuagccgucucuccu

SEQ ID NO: 2855 - RNA, 17 nt, artificial sequence
  misc_feature: oligonucleotide substrate
ucucuccuguaaugugg

SEQ ID NO: 2856 - RNA, 17 nt, artificial sequence
  misc_feature: oligonucleotide substrate
cuccuguaaugugggag

SEQ ID NO: 2857 - RNA, 17 nt, artificial sequence
  misc_feature: oligonucleotide substrate
ccuguaaugugggaggg

SEQ ID NO: 2858 - RNA, 17 nt, artificial sequence
  misc_feature: oligonucleotide substrate
ugggaggggucggugag

SEQ ID NO: 2859 - RNA, 17 nt, artificial sequence
  misc_feature: oligonucleotide substrate
aggggucggugagcaug

SEQ ID NO: 2860 - RNA, 17 nt, artificial sequence
  misc_feature: oligonucleotide substrate
gucggugagcauggacg

SEQ ID NO: 2861 - RNA, 17 nt, artificial sequence
  misc_feature: oligonucleotide substrate
cggugagcauggacgug

SEQ ID NO: 2862 - RNA, 17 nt, artificial sequence
  misc_feature: oligonucleotide substrate
gagcauggacgugagca

SEQ ID NO: 2863 - RNA, 17 nt, artificial sequence
  misc_feature: oligonucleotide substrate
gcauggacgugagcacu

SEQ ID NO: 2864 - RNA, 17 nt, artificial sequence
  misc_feature: oligonucleotide substrate
ggacgugagcacugcua

SEQ ID NO: 2865 - RNA, 17 nt, artificial sequence
  misc_feature: oligonucleotide substrate
acgugagcacugcuaca

SEQ ID NO: 2866 - RNA, 17 nt, artificial sequence
  misc_feature: oligonucleotide substrate
ugagcacugcuacaucc

SEQ ID NO: 2867 - RNA, 17 nt, artificial sequence
  misc_feature: oligonucleotide substrate
gcacugcuacauccggu

SEQ ID NO: 2868 - RNA, 17 nt, artificial sequence
  misc_feature: oligonucleotide substrate
acugcuacauccgguuc

SEQ ID NO: 2869 - RNA, 17 nt, artificial sequence
  misc_feature: oligonucleotide substrate
uacauccgguucgggcu

SEQ ID NO: 2870 - RNA, 17 nt, artificial sequence
  misc_feature: oligonucleotide substrate
cgguucgggcucgcaug

SEQ ID NO: 2871 - RNA, 17 nt, artificial sequence
  misc_feature: oligonucleotide substrate
ucgggcucgcaugggag

SEQ ID NO: 2872 - RNA, 17 nt, artificial sequence
  misc_feature: oligonucleotide substrate
gggcucgcaugggagcu

SEQ ID NO: 2873 - RNA, 17 nt, artificial sequence
  misc_feature: oligonucleotide substrate
gcaugggagcugugacc

SEQ ID NO: 2874 - RNA, 17 nt, artificial sequence
  misc_feature: oligonucleotide substrate
ugggagcugugacccaa

SEQ ID NO: 2875 - RNA, 17 nt, artificial sequence
  misc_feature: oligonucleotide substrate
gagcugugacccaacca

SEQ ID NO: 2876 - RNA, 17 nt, artificial sequence
  misc_feature: oligonucleotide substrate
gugacccaaccagguau

SEQ ID NO: 2877 - RNA, 17 nt, artificial sequence
  misc_feature: oligonucleotide substrate
ccaaccagguauugguu

SEQ ID NO: 2878 - RNA, 17 nt, artificial sequence
  misc_feature: oligonucleotide substrate
aaccagguauugguuga

SEQ ID NO: 2879 - RNA, 17 nt, artificial sequence
  misc_feature: oligonucleotide substrate
agguauugguugagccc

SEQ ID NO: 2880 - RNA, 17 nt, artificial sequence
  misc_feature: oligonucleotide substrate
uugguugagcccgaccu

SEQ ID NO: 2881 - RNA, 17 nt, artificial sequence
  misc_feature: oligonucleotide substrate
ugagcccgaccuggaau

SEQ ID NO: 2882 - RNA, 17 nt, artificial sequence
  misc_feature: oligonucleotide substrate
gaccuggaaugugaccu

SEQ ID NO: 2883 - RNA, 17 nt, artificial sequence
  misc_feature: oligonucleotide substrate
ccuggaaugugaccucc

SEQ ID NO: 2884 - RNA, 17 nt, artificial sequence
  misc_feature: oligonucleotide substrate
ggaaugugaccuccucc

SEQ ID NO: 2885 - RNA, 17 nt, artificial sequence
  misc_feature: oligonucleotide substrate
cuccucccguaggagag

SEQ ID NO: 2886 - RNA, 17 nt, artificial sequence
  misc_feature: oligonucleotide substrate
uaggagagguccacacg

SEQ ID NO: 2887 - RNA, 17 nt, artificial sequence
  misc_feature: oligonucleotide substrate
agagguccacacgccgg

SEQ ID NO: 2888 - RNA, 17 nt, artificial sequence
  misc_feature: oligonucleotide substrate
agguccacacgccggag

SEQ ID NO: 2889 - RNA, 17 nt, artificial sequence
  misc_feature: oligonucleotide substrate
guccacacgccggagcg

SEQ ID NO: 2890 - RNA, 17 nt, artificial sequence
  misc_feature: oligonucleotide substrate
acgccggagcguuucug

SEQ ID NO: 2891 - RNA, 17 nt, artificial sequence
  misc_feature: oligonucleotide substrate
gccggagcguuucugug

SEQ ID NO: 2892 - RNA, 17 nt, artificial sequence
  misc_feature: oligonucleotide substrate
gcguuucugugcaggcg

SEQ ID NO: 2893 - RNA, 17 nt, artificial sequence
  misc_feature: oligonucleotide substrate
guuucugugcaggcgua

SEQ ID NO: 2894 - RNA, 17 nt, artificial sequence
  misc_feature: oligonucleotide substrate
cugugcaggcguacccc

SEQ ID NO: 2895 - RNA, 17 nt, artificial sequence
  misc_feature: oligonucleotide substrate
gugcaggcguaccccau

SEQ ID NO: 2896 - RNA, 17 nt, artificial sequence
  misc_feature: oligonucleotide substrate
gcaggcguaccccaucc

SEQ ID NO: 2897 - RNA, 17 nt, artificial sequence
  misc_feature: oligonucleotide substrate
cguaccccauccacuuc

SEQ ID NO: 2898 - RNA, 17 nt, artificial sequence
  misc_feature: oligonucleotide substrate
ccccauccacuuccgug

SEQ ID NO: 2899 - RNA, 17 nt, artificial sequence
  misc_feature: oligonucleotide substrate
ccacuuccgugaagaau

SEQ ID NO: 2900 - RNA, 17 nt, artificial sequence
  misc_feature: oligonucleotide substrate
cgugaagaauucggggg

SEQ ID NO: 2901 - RNA, 17 nt, artificial sequence
  misc_feature: oligonucleotide substrate
uucggggggcggaaccu

SEQ ID NO: 2902 - RNA, 17 nt, artificial sequence
  misc_feature: oligonucleotide substrate
ggggcggaaccuggcac

SEQ ID NO: 2903 - RNA, 17 nt, artificial sequence
  misc_feature: oligonucleotide substrate
ggaaccuggcacgggca

SEQ ID NO: 2904 - RNA, 17 nt, artificial sequence
  misc_feature: oligonucleotide substrate
aaccuggcacgggcauu

SEQ ID NO: 2905 - RNA, 17 nt, artificial sequence
  misc_feature: oligonucleotide substrate
uggcacgggcauuuuac

SEQ ID NO: 2906 - RNA, 17 nt, artificial sequence
  misc_feature: oligonucleotide substrate
gcacgggcauuuuacgu

SEQ ID NO: 2907 - RNA, 17 nt, artificial sequence
  misc_feature: oligonucleotide substrate
ggcauuuuacguuguca

SEQ ID NO: 2908 - RNA, 17 nt, artificial sequence
  misc_feature: oligonucleotide substrate
cauuuuacguugucagu

SEQ ID NO: 2909 - RNA, 17 nt, artificial sequence
  misc_feature: oligonucleotide substrate
uuuacguugucaguggu

SEQ ID NO: 2910 - RNA, 17 nt, artificial sequence
  misc_feature: oligonucleotide substrate
cguugucaguggucaug

SEQ ID NO: 2911 - RNA, 17 nt, artificial sequence
  misc_feature: oligonucleotide substrate
ugucaguggucaugccc

SEQ ID NO: 2912 - RNA, 17 nt, artificial sequence
  misc_feature: oligonucleotide substrate
caguggucaugcccguc

SEQ ID NO: 2913 - RNA, 17 nt, artificial sequence
  misc_feature: oligonucleotide substrate
guggucaugcccgucac

SEQ ID NO: 2914 - RNA, 17 nt, artificial sequence
  misc_feature: oligonucleotide substrate
ucaugcccgucacguag

SEQ ID NO: 2915 - RNA, 17 nt, artificial sequence
  misc_feature: oligonucleotide substrate
ugcccgucacguagugg

SEQ ID NO: 2916 - RNA, 17 nt, artificial sequence
  misc_feature: oligonucleotide substrate
cccgucacguaguggaa

SEQ ID NO: 2917 - RNA, 17 nt, artificial sequence
  misc_feature: oligonucleotide substrate
gucacguaguggaaauc

SEQ ID NO: 2918 - RNA, 17 nt, artificial sequence
  misc_feature: oligonucleotide substrate
uaguggaaaucccccac

SEQ ID NO: 2919 - RNA, 17 nt, artificial sequence
  misc_feature: oligonucleotide substrate
aaucccccacccgcgua

SEQ ID NO: 2920 - RNA, 17 nt, artificial sequence
  misc_feature: oligonucleotide substrate
ccccacccgcguaaccu

SEQ ID NO: 2921 - RNA, 17 nt, artificial sequence
  misc_feature: oligonucleotide substrate
ccacccgcguaaccucc

SEQ ID NO: 2922 - RNA, 17 nt, artificial sequence
  misc_feature: oligonucleotide substrate
cccgcguaaccuccacg

SEQ ID NO: 2923 - RNA, 17 nt, artificial sequence
  misc_feature: oligonucleotide substrate
uaaccuccacguacucc

SEQ ID NO: 2924 - RNA, 17 nt, artificial sequence
  misc_feature: oligonucleotide substrate
accuccacguacuccuc

SEQ ID NO: 2925 - RNA, 17 nt, artificial sequence
  misc_feature: oligonucleotide substrate
cuccacguacuccucag

SEQ ID NO: 2926 - RNA, 17 nt, artificial sequence
  misc_feature: oligonucleotide substrate
acuccucagcggccacc

SEQ ID NO: 2927 - RNA, 17 nt, artificial sequence
  misc_feature: oligonucleotide substrate
ccucagcggccacccgc

SEQ ID NO: 2928 - RNA, 17 nt, artificial sequence
  misc_feature: oligonucleotide substrate
cagcggccacccgccau

SEQ ID NO: 2929 - RNA, 17 nt, artificial sequence
  misc_feature: oligonucleotide substrate
ggccacccgccauagcg

SEQ ID NO: 2930 - RNA, 17 nt, artificial sequence
  misc_feature: oligonucleotide substrate
cacccgccauagcgccc

SEQ ID NO: 2931 - RNA, 17 nt, artificial sequence
  misc_feature: oligonucleotide substrate
ccgccauagcgcccuag

SEQ ID NO: 2932 - RNA, 17 nt, artificial sequence
  misc_feature: oligonucleotide substrate
gccauagcgcccuagaa

SEQ ID NO: 2933 - RNA, 17 nt, artificial sequence
  misc_feature: oligonucleotide substrate
gcccuagaauaguuugg

SEQ ID NO: 2934 - RNA, 17 nt, artificial sequence
  misc_feature: oligonucleotide substrate
cuagaauaguuuggcgc

SEQ ID NO: 2935 - RNA, 17 nt, artificial sequence
  misc_feature: oligonucleotide substrate
auaguuuggcgccgggg

SEQ ID NO: 2936 - RNA, 17 nt, artificial sequence
  misc_feature: oligonucleotide substrate
aguuuggcgccggggag

SEQ ID NO: 2937 - RNA, 17 nt, artificial sequence
  misc_feature: oligonucleotide substrate
cggggagggugugcagg

SEQ ID NO: 2938 - RNA, 17 nt, artificial sequence
  misc_feature: oligonucleotide substrate
gggagggugugcagggg

SEQ ID NO: 2939 - RNA, 17 nt, artificial sequence
  misc_feature: oligonucleotide substrate
gagggugugcaggggcc

SEQ ID NO: 2940 - RNA, 17 nt, artificial sequence
  misc_feature: oligonucleotide substrate
gugcaggggcccguggu

SEQ ID NO: 2941 - RNA, 17 nt, artificial sequence
  misc_feature: oligonucleotide substrate
aggggcccgugguguau

SEQ ID NO: 2942 - RNA, 17 nt, artificial sequence
  misc_feature: oligonucleotide substrate
ggcccgugguguaugcg

SEQ ID NO: 2943 - RNA, 17 nt, artificial sequence
  misc_feature: oligonucleotide substrate
cccgugguguaugcguu

SEQ ID NO: 2944 - RNA, 17 nt, artificial sequence
  misc_feature: oligonucleotide substrate
cgugguguaugcguuga

SEQ ID NO: 2945 - RNA, 17 nt, artificial sequence
  misc_feature: oligonucleotide substrate
ugguguaugcguugaug

SEQ ID NO: 2946 - RNA, 17 nt, artificial sequence
  misc_feature: oligonucleotide substrate
guguaugcguugauggg

SEQ ID NO: 2947 - RNA, 17 nt, artificial sequence
  misc_feature: oligonucleotide substrate
augcguugauggggaau

SEQ ID NO: 2948 - RNA, 17 nt, artificial sequence
  misc_feature: oligonucleotide substrate
gauggggaauguuccau

SEQ ID NO: 2949 - RNA, 17 nt, artificial sequence
  misc_feature: oligonucleotide substrate
uggggaauguuccaugc

SEQ ID NO: 2950 - RNA, 17 nt, artificial sequence
  misc_feature: oligonucleotide substrate
aauguuccaugccacgu

SEQ ID NO: 2951 - RNA, 17 nt, artificial sequence
  misc_feature: oligonucleotide substrate
uguuccaugccacgugu

SEQ ID NO: 2952 - RNA, 17 nt, artificial sequence
  misc_feature: oligonucleotide substrate
uccaugccacguguugc

SEQ ID NO: 2953 - RNA, 17 nt, artificial sequence
  misc_feature: oligonucleotide substrate
caugccacguguugcua

SEQ ID NO: 2954 - RNA, 17 nt, artificial sequence
  misc_feature: oligonucleotide substrate
ugccacguguugcuaca

SEQ ID NO: 2955 - RNA, 17 nt, artificial sequence
  misc_feature: oligonucleotide substrate
cacguguugcuacaggu

SEQ ID NO: 2956 - RNA, 17 nt, artificial sequence
  misc_feature: oligonucleotide substrate
guguugcuacaggucuu

SEQ ID NO: 2957 - RNA, 17 nt, artificial sequence
  misc_feature: oligonucleotide substrate
ugcuacaggucuuaggc

SEQ ID NO: 2958 - RNA, 17 nt, artificial sequence
  misc_feature: oligonucleotide substrate
ggucuuaggcccgacga

SEQ ID NO: 2959 - RNA, 17 nt, artificial sequence
  misc_feature: oligonucleotide substrate
uaggcccgacgauccuc

SEQ ID NO: 2960 - RNA, 17 nt, artificial sequence
  misc_feature: oligonucleotide substrate
gcccgacgauccucaug

SEQ ID NO: 2961 - RNA, 17 nt, artificial sequence
  misc_feature: oligonucleotide substrate
cgauccucauggaaccg

SEQ ID NO: 2962 - RNA, 17 nt, artificial sequence
  misc_feature: oligonucleotide substrate
cucauggaaccguucuu

SEQ ID NO: 2963 - RNA, 17 nt, artificial sequence
  misc_feature: oligonucleotide substrate
auggaaccguucuugac

SEQ ID NO: 2964 - RNA, 17 nt, artificial sequence
  misc_feature: oligonucleotide substrate
cguucuugacaugucca

SEQ ID NO: 2965 - RNA, 17 nt, artificial sequence
  misc_feature: oligonucleotide substrate
uucuugacauguccagu

SEQ ID NO: 2966 - RNA, 17 nt, artificial sequence
  misc_feature: oligonucleotide substrate
cuugacauguccaguga

SEQ ID NO: 2967 - RNA, 17 nt, artificial sequence
  misc_feature: oligonucleotide substrate
cauguccagugaucugc

SEQ ID NO: 2968 - RNA, 17 nt, artificial sequence
  misc_feature: oligonucleotide substrate
guccagugaucugcgcu

SEQ ID NO: 2969 - RNA, 17 nt, artificial sequence
  misc_feature: oligonucleotide substrate
agugaucugcgcuccgc

SEQ ID NO: 2970 - RNA, 17 nt, artificial sequence
  misc_feature: oligonucleotide substrate
ugaucugcgcuccgcau

SEQ ID NO: 2971 - RNA, 17 nt, artificial sequence
  misc_feature: oligonucleotide substrate
ugcgcuccgcaugggca

SEQ ID NO: 2972 - RNA, 17 nt, artificial sequence
  misc_feature: oligonucleotide substrate
cgcuccgcaugggcagg

SEQ ID NO: 2973 - RNA, 17 nt, artificial sequence
  misc_feature: oligonucleotide substrate
ccgcaugggcagguggu

SEQ ID NO: 2974 - RNA, 17 nt, artificial sequence
  misc_feature: oligonucleotide substrate
augggcaggugguuugc

SEQ ID NO: 2975 - RNA, 17 nt, artificial sequence
  misc_feature: oligonucleotide substrate
ggcaggugguuugcaug

SEQ ID NO: 2976 - RNA, 17 nt, artificial sequence
  misc_feature: oligonucleotide substrate
ggugguuugcaugauac

SEQ ID NO: 2977 - RNA, 17 nt, artificial sequence
  misc_feature: oligonucleotide substrate
ugguuugcaugauaccg

SEQ ID NO: 2978 - RNA, 17 nt, artificial sequence
  misc_feature: oligonucleotide substrate
uuugcaugauaccgucu

SEQ ID NO: 2979 - RNA, 17 nt, artificial sequence
  misc_feature: oligonucleotide substrate
ugcaugauaccgucucc

SEQ ID NO: 2980 - RNA, 17 nt, artificial sequence
  misc_feature: oligonucleotide substrate
augauaccgucuccccg

SEQ ID NO: 2981 - RNA, 17 nt, artificial sequence
  misc_feature: oligonucleotide substrate
gucuccccgccagaccc

SEQ ID NO: 2982 - RNA, 17 nt, artificial sequence
  misc_feature: oligonucleotide substrate
cccgccagaccccccug

SEQ ID NO: 2983 - RNA, 17 nt, artificial sequence
  misc_feature: oligonucleotide substrate
accccccuguacccacg

SEQ ID NO: 2984 - RNA, 17 nt, artificial sequence
  misc_feature: oligonucleotide substrate
cccccuguacccacguu

SEQ ID NO: 2985 - RNA, 17 nt, artificial sequence
  misc_feature: oligonucleotide substrate
cuguacccacguuggca

SEQ ID NO: 2986 - RNA, 17 nt, artificial sequence
  misc_feature: oligonucleotide substrate
guacccacguuggcaug

SEQ ID NO: 2987 - RNA, 17 nt, artificial sequence
  misc_feature: oligonucleotide substrate
ccacguuggcaugagaa

SEQ ID NO: 2988 - RNA, 17 nt, artificial sequence
  misc_feature: oligonucleotide substrate
acguuggcaugagaaga

SEQ ID NO: 2989 - RNA, 17 nt, artificial sequence
  misc_feature: oligonucleotide substrate
agaaagggacucccggc

SEQ ID NO: 2990 - RNA, 17 nt, artificial sequence
  misc_feature: oligonucleotide substrate
gacucccggcaaccgcg

SEQ ID NO: 2991 - RNA, 17 nt, artificial sequence
  misc_feature: oligonucleotide substrate
ucccggcaaccgcggca

SEQ ID NO: 2992 - RNA, 17 nt, artificial sequence
  misc_feature: oligonucleotide substrate
cggcaaccgcggcagga

SEQ ID NO: 2993 - RNA, 17 nt, artificial sequence
  misc_feature: oligonucleotide substrate
caaccgcggcaggagcu

SEQ ID NO: 2994 - RNA, 17 nt, artificial sequence
  misc_feature: oligonucleotide substrate
cggcaggagcuuggacu

SEQ ID NO: 2995 - RNA, 17 nt, artificial sequence
  misc_feature: oligonucleotide substrate
gagcuuggacugaagcc

SEQ ID NO: 2996 - RNA, 17 nt, artificial sequence
  misc_feature: oligonucleotide substrate
ggacugaagccaggucu

SEQ ID NO: 2997 - RNA, 17 nt, artificial sequence
  misc_feature: oligonucleotide substrate
gaagccaggucuugaag

SEQ ID NO: 2998 - RNA, 17 nt, artificial sequence
  misc_feature: oligonucleotide substrate
gucuugaagucagucaa

SEQ ID NO: 2999 - RNA, 17 nt, artificial sequence
  misc_feature: oligonucleotide substrate
ugaagucagucaacacc

SEQ ID NO: 3000 - RNA, 17 nt, artificial sequence
  misc_feature: oligonucleotide substrate
gucagucaacaccgugc

SEQ ID NO: 3001 - RNA, 17 nt, artificial sequence
  misc_feature: oligonucleotide substrate
cagucaacaccgugcau

SEQ ID NO: 3002 - RNA, 17 nt, artificial sequence
  misc_feature: oligonucleotide substrate
ucaacaccgugcauauc

SEQ ID NO: 3003 - RNA, 17 nt, artificial sequence
  misc_feature: oligonucleotide substrate
aacaccgugcauaucca

SEQ ID NO: 3004 - RNA, 17 nt, artificial sequence
  misc_feature: oligonucleotide substrate
caccgugcauauccagu

SEQ ID NO: 3005 - RNA, 17 nt, artificial sequence
  misc_feature: oligonucleotide substrate
ccgugcauauccagucc

SEQ ID NO: 3006 - RNA, 17 nt, artificial sequence
  misc_feature: oligonucleotide substrate
cauauccagucccaaac

SEQ ID NO: 3007 - RNA, 17 nt, artificial sequence
  misc_feature: oligonucleotide substrate
agucccaaacaucccuu

SEQ ID NO: 3008 - RNA, 17 nt, artificial sequence
  misc_feature: oligonucleotide substrate
ucccaaacaucccuuag

SEQ ID NO: 3009 - RNA, 17 nt, artificial sequence
  misc_feature: oligonucleotide substrate
aucccuuagccacgagc

SEQ ID NO: 3010 - RNA, 17 nt, artificial sequence
  misc_feature: oligonucleotide substrate
ccuuagccacgagccgg

SEQ ID NO: 3011 - RNA, 17 nt, artificial sequence
  misc_feature: oligonucleotide substrate
agccacgagccggaaca

SEQ ID NO: 3012 - RNA, 17 nt, artificial sequence
  misc_feature: oligonucleotide substrate
gagccggaacauggcgu

SEQ ID NO: 3013 - RNA, 17 nt, artificial sequence
  misc_feature: oligonucleotide substrate
gccggaacauggcgugg

SEQ ID NO: 3014 - RNA, 17 nt, artificial sequence
  misc_feature: oligonucleotide substrate
ggaacauggcguggagc

SEQ ID NO: 3015 - RNA, 17 nt, artificial sequence
  misc_feature: oligonucleotide substrate
aacauggcguggagcag

SEQ ID NO: 3016 - RNA, 17 nt, artificial sequence
  misc_feature: oligonucleotide substrate
ggcguggagcaguccuc

SEQ ID NO: 3017 - RNA, 17 nt, artificial sequence
  misc_feature: oligonucleotide substrate
guggagcaguccucauu

SEQ ID NO: 3018 - RNA, 17 nt, artificial sequence
  misc_feature: oligonucleotide substrate
caguccucauugaucca

SEQ ID NO: 3019 - RNA, 17 nt, artificial sequence
  misc_feature: oligonucleotide substrate
ccucauugauccacuga

SEQ ID NO: 3020 - RNA, 17 nt, artificial sequence
  misc_feature: oligonucleotide substrate
auugauccacugaugga

SEQ ID NO: 3021 - RNA, 17 nt, artificial sequence
  misc_feature: oligonucleotide substrate
auccacugauggagccu

SEQ ID NO: 3022 - RNA, 17 nt, artificial sequence
  misc_feature: oligonucleotide substrate
cugauggagccuccuca

SEQ ID NO: 3023 - RNA, 17 nt, artificial sequence
  misc_feature: oligonucleotide substrate
ccuccucagcagcugag

SEQ ID NO: 3024 - RNA, 17 nt, artificial sequence
  misc_feature: oligonucleotide substrate
ccucagcagcugaguga

SEQ ID NO: 3025 - RNA, 17 nt, artificial sequence
  misc_feature: oligonucleotide substrate
gcagcugagugauggug

SEQ ID NO: 3026 - RNA, 17 nt, artificial sequence
  misc_feature: oligonucleotide substrate
gcugagugauggugagg

SEQ ID NO: 3027 - RNA, 17 nt, artificial sequence
  misc_feature: oligonucleotide substrate
gagugauggugaggcug

SEQ ID NO: 3028 - RNA, 17 nt, artificial sequence
  misc_feature: oligonucleotide substrate
auggugaggcuggagag

SEQ ID NO: 3029 - RNA, 17 nt, artificial sequence
  misc_feature: oligonucleotide substrate
uggagaggauuugugug

SEQ ID NO: 3030 - RNA, 17 nt, artificial sequence
  misc_feature: oligonucleotide substrate
gaggauuugugugacgc

SEQ ID NO: 3031 - RNA, 17 nt, artificial sequence
  misc_feature: oligonucleotide substrate
ggauuugugugacgcgc

SEQ ID NO: 3032 - RNA, 17 nt, artificial sequence
  misc_feature: oligonucleotide substrate
uuugugugacgcgcgcc

SEQ ID NO: 3033 - RNA, 17 nt, artificial sequence
  misc_feature: oligonucleotide substrate
ugugugacgcgcgccgc

SEQ ID NO: 3034 - RNA, 17 nt, artificial sequence
  misc_feature: oligonucleotide substrate
ugugacgcgcgccgcug

SEQ ID NO: 3035 - RNA, 17 nt, artificial sequence
  misc_feature: oligonucleotide substrate
ugacgcgcgccgcugcg

SEQ ID NO: 3036 - RNA, 17 nt, artificial sequence
  misc_feature: oligonucleotide substrate
cgcgcgccgcugcgucg

SEQ ID NO: 3037 - RNA, 17 nt, artificial sequence
  misc_feature: oligonucleotide substrate
gcgccgcugcgucgcuc

SEQ ID NO: 3038 - RNA, 17 nt, artificial sequence
  misc_feature: oligonucleotide substrate
gccgcugcgucgcucuc

SEQ ID NO: 3039 - RNA, 17 nt, artificial sequence
  misc_feature: oligonucleotide substrate
gcugcgucgcucucagg

SEQ ID NO: 3040 - RNA, 17 nt, artificial sequence
  misc_feature: oligonucleotide substrate
gcucucaggcacauagu

SEQ ID NO: 3041 - RNA, 17 nt, artificial sequence
  misc_feature: oligonucleotide substrate
ucucaggcacauagugc

SEQ ID NO: 3042 - RNA, 17 nt, artificial sequence
  misc_feature: oligonucleotide substrate
ucaggcacauagugcgu

SEQ ID NO: 3043 - RNA, 17 nt, artificial sequence
  misc_feature: oligonucleotide substrate
ggcacauagugcguggg

SEQ ID NO: 3044 - RNA, 17 nt, artificial sequence
  misc_feature: oligonucleotide substrate
cacauagugcguggggg

SEQ ID NO: 3045 - RNA, 17 nt, artificial sequence
  misc_feature: oligonucleotide substrate
cauagugcgugggggag

SEQ ID NO: 3046 - RNA, 17 nt, artificial sequence
  misc_feature: oligonucleotide substrate
ugggggagacaugguug

SEQ ID NO: 3047 - RNA, 17 nt, artificial sequence
  misc_feature: oligonucleotide substrate
ggggagacaugguugcc

SEQ ID NO: 3048 - RNA, 17 nt, artificial sequence
  misc_feature: oligonucleotide substrate
gagacaugguugccccg

SEQ ID NO: 3049 - RNA, 17 nt, artificial sequence
  misc_feature: oligonucleotide substrate
acaugguugccccgcga

SEQ ID NO: 3050 - RNA, 17 nt, artificial sequence
  misc_feature: oligonucleotide substrate
guugccccgcgaagcga

SEQ ID NO: 3051 - RNA, 17 nt, artificial sequence
  misc_feature: oligonucleotide substrate
cccgcgaagcgaacgcu

SEQ ID NO: 3052 - RNA, 17 nt, artificial sequence
  misc_feature: oligonucleotide substrate
cgaagcgaacgcuauca

SEQ ID NO: 3053 - RNA, 17 nt, artificial sequence
  misc_feature: oligonucleotide substrate
aagcgaacgcuaucagc

SEQ ID NO: 3054 - RNA, 17 nt, artificial sequence
  misc_feature: oligonucleotide substrate
cgaacgcuaucagccga

SEQ ID NO: 3055 - RNA, 17 nt, artificial sequence
  misc_feature: oligonucleotide substrate
cgcuaucagccgauuca

SEQ ID NO: 3056 - RNA, 17 nt, artificial sequence
  misc_feature: oligonucleotide substrate
aucagccgauucaucca

SEQ ID NO: 3057 - RNA, 17 nt, artificial sequence
  misc_feature: oligonucleotide substrate
gccgauucauccacugc

SEQ ID NO: 3058 - RNA, 17 nt, artificial sequence
  misc_feature: oligonucleotide substrate
auucauccacugcacag

SEQ ID NO: 3059 - RNA, 17 nt, artificial sequence
  misc_feature: oligonucleotide substrate
cauccacugcacagcgc

SEQ ID NO: 3060 - RNA, 17 nt, artificial sequence
  misc_feature: oligonucleotide substrate
uccacugcacagcgccc

SEQ ID NO: 3061 - RNA, 17 nt, artificial sequence
  misc_feature: oligonucleotide substrate
acugcacagcgcccucu

SEQ ID NO: 3062 - RNA, 17 nt, artificial sequence
  misc_feature: oligonucleotide substrate
ugcacagcgcccucucc

SEQ ID NO: 3063 - RNA, 17 nt, artificial sequence
  misc_feature: oligonucleotide substrate
ucuccugggcccacaug

SEQ ID NO: 3064 - RNA, 17 nt, artificial sequence
  misc_feature: oligonucleotide substrate
cugggcccacaugccga

SEQ ID NO: 3065 - RNA, 17 nt, artificial sequence
  misc_feature: oligonucleotide substrate
gggcccacaugccgacg

SEQ ID NO: 3066 - RNA, 17 nt, artificial sequence
  misc_feature: oligonucleotide substrate
gcccacaugccgacgca

SEQ ID NO: 3067 - RNA, 17 nt, artificial sequence
  misc_feature: oligonucleotide substrate
acaugccgacgcaguau

SEQ ID NO: 3068 - RNA, 17 nt, artificial sequence
  misc_feature: oligonucleotide substrate
augccgacgcaguaucg

SEQ ID NO: 3069 - RNA, 17 nt, artificial sequence
  misc_feature: oligonucleotide substrate
ccgacgcaguaucgcug

SEQ ID NO: 3070 - RNA, 17 nt, artificial sequence
  misc_feature: oligonucleotide substrate
gacgcaguaucgcugcg

SEQ ID NO: 3071 - RNA, 17 nt, artificial sequence
  misc_feature: oligonucleotide substrate
gcaguaucgcugcgcac

SEQ ID NO: 3072 - RNA, 17 nt, artificial sequence
  misc_feature: oligonucleotide substrate
guaucgcugcgcacacc

SEQ ID NO: 3073 - RNA, 17 nt, artificial sequence
  misc_feature: oligonucleotide substrate
aucgcugcgcacaccac

SEQ ID NO: 3074 - RNA, 17 nt, artificial sequence
  misc_feature: oligonucleotide substrate
cgcugcgcacaccaccc

SEQ ID NO: 3075 - RNA, 17 nt, artificial sequence
  misc_feature: oligonucleotide substrate
cugcgcacaccaccccg

SEQ ID NO: 3076 - RNA, 17 nt, artificial sequence
  misc_feature: oligonucleotide substrate
cgcacaccaccccgacg

SEQ ID NO: 3077 - RNA, 17 nt, artificial sequence
  misc_feature: oligonucleotide substrate
ccaccccgacgaccagg

SEQ ID NO: 3078 - RNA, 17 nt, artificial sequence
  misc_feature: oligonucleotide substrate
ccccgacgaccagggcg

SEQ ID NO: 3079 - RNA, 17 nt, artificial sequence
  misc_feature: oligonucleotide substrate
cgaccagggcgccagga

SEQ ID NO: 3080 - RNA, 17 nt, artificial sequence
  misc_feature: oligonucleotide substrate
accagggcgccaggaga

SEQ ID NO: 3081 - RNA, 17 nt, artificial sequence
  misc_feature: oligonucleotide substrate
gagagaggauggcaggg

SEQ ID NO: 3082 - RNA, 17 nt, artificial sequence
  misc_feature: oligonucleotide substrate
agaggauggcagggagu

SEQ ID NO: 3083 - RNA, 17 nt, artificial sequence
  misc_feature: oligonucleotide substrate
ggcagggaguaaguuga

SEQ ID NO: 3084 - RNA, 17 nt, artificial sequence
  misc_feature: oligonucleotide substrate
gggaguaaguugaccag

SEQ ID NO: 3085 - RNA, 17 nt, artificial sequence
  misc_feature: oligonucleotide substrate
guaaguugaccaggucc

SEQ ID NO: 3086 - RNA, 17 nt, artificial sequence
  misc_feature: oligonucleotide substrate
uugaccagguccucggu

SEQ ID NO: 3087 - RNA, 17 nt, artificial sequence
  misc_feature: oligonucleotide substrate
gguccucgguagaaggc

SEQ ID NO: 3088 - RNA, 17 nt, artificial sequence
  misc_feature: oligonucleotide substrate
gguagaaggcaucuccc

SEQ ID NO: 3089 - RNA, 17 nt, artificial sequence
  misc_feature: oligonucleotide substrate
uagaaggcaucuccccg

SEQ ID NO: 3090 - RNA, 17 nt, artificial sequence
  misc_feature: oligonucleotide substrate
aucuccccgcucaugac

SEQ ID NO: 3091 - RNA, 17 nt, artificial sequence
  misc_feature: oligonucleotide substrate
ccccgcucaugaccuug

SEQ ID NO: 3092 - RNA, 17 nt, artificial sequence
  misc_feature: oligonucleotide substrate
cgcucaugaccuugaag

SEQ ID NO: 3093 - RNA, 17 nt, artificial sequence
  misc_feature: oligonucleotide substrate
ccuugaaggccacgaga

SEQ ID NO: 3094 - RNA, 17 nt, artificial sequence
  misc_feature: oligonucleotide substrate
ugaaggccacgagagca

SEQ ID NO: 3095 - RNA, 17 nt, artificial sequence
  misc_feature: oligonucleotide substrate
ccacgagagcacccgcc

SEQ ID NO: 3096 - RNA, 17 nt, artificial sequence
  misc_feature: oligonucleotide substrate
acgagagcacccgccac

SEQ ID NO: 3097 - RNA, 17 nt, artificial sequence
  misc_feature: oligonucleotide substrate
gagcacccgccacuccu

SEQ ID NO: 3098 - RNA, 17 nt, artificial sequence
  misc_feature: oligonucleotide substrate
cacccgccacuccugcu

SEQ ID NO: 3099 - RNA, 17 nt, artificial sequence
  misc_feature: oligonucleotide substrate
ccacuccugcuccauag

SEQ ID NO: 3100 - RNA, 17 nt, artificial sequence
  misc_feature: oligonucleotide substrate
ccugcuccauagcccgc

SEQ ID NO: 3101 - RNA, 17 nt, artificial sequence
  misc_feature: oligonucleotide substrate
gcuccauagcccgccag

SEQ ID NO: 3102 - RNA, 17 nt, artificial sequence
  misc_feature: oligonucleotide substrate
cauagcccgccagaaug

SEQ ID NO: 3103 - RNA, 17 nt, artificial sequence
  misc_feature: oligonucleotide substrate
ccgccagaaugucuaca

SEQ ID NO: 3104 - RNA, 17 nt, artificial sequence
  misc_feature: oligonucleotide substrate
gccagaaugucuacaag

SEQ ID NO: 3105 - RNA, 17 nt, artificial sequence
  misc_feature: oligonucleotide substrate
gaaugucuacaagcacc

SEQ ID NO: 3106 - RNA, 17 nt, artificial sequence
  misc_feature: oligonucleotide substrate
gucuacaagcaccuucc

SEQ ID NO: 3107 - RNA, 17 nt, artificial sequence
  misc_feature: oligonucleotide substrate
cuacaagcaccuuccca

SEQ ID NO: 3108 - RNA, 17 nt, artificial sequence
  misc_feature: oligonucleotide substrate
uucccaaggccuaugcu

SEQ ID NO: 3109 - RNA, 17 nt, artificial sequence
  misc_feature: oligonucleotide substrate
caaggccuaugcugcca

SEQ ID NO: 3110 - RNA, 17 nt, artificial sequence
  misc_feature: oligonucleotide substrate
aggccuaugcugccaac

SEQ ID NO: 3111 - RNA, 17 nt, artificial sequence
  misc_feature: oligonucleotide substrate
ccuaugcugccaacagc

SEQ ID NO: 3112 - RNA, 17 nt, artificial sequence
  misc_feature: oligonucleotide substrate
ugcugccaacagccgcg

SEQ ID NO: 3113 - RNA, 17 nt, artificial sequence
  misc_feature: oligonucleotide substrate
ugccaacagccgcgcca

SEQ ID NO: 3114 - RNA, 17 nt, artificial sequence
  misc_feature: oligonucleotide substrate
caacagccgcgccagcg

SEQ ID NO: 3115 - RNA, 17 nt, artificial sequence
  misc_feature: oligonucleotide substrate
acagccgcgccagcgau

SEQ ID NO: 3116 - RNA, 17 nt, artificial sequence
  misc_feature: oligonucleotide substrate
ccgcgccagcgaugccg

SEQ ID NO: 3117 - RNA, 17 nt, artificial sequence
  misc_feature: oligonucleotide substrate
cgccagcgaugccggcg

SEQ ID NO: 3118 - RNA, 17 nt, artificial sequence
  misc_feature: oligonucleotide substrate
ccagcgaugccggcgcc

SEQ ID NO: 3119 - RNA, 17 nt, artificial sequence
  misc_feature: oligonucleotide substrate
cgaugccggcgcccacg

SEQ ID NO: 3120 - RNA, 17 nt, artificial sequence
  misc_feature: oligonucleotide substrate
augccggcgcccacgaa

SEQ ID NO: 3121 - RNA, 17 nt, artificial sequence
  misc_feature: oligonucleotide substrate
cggcgcccacgaaggcc

SEQ ID NO: 3122 - RNA, 17 nt, artificial sequence
  misc_feature: oligonucleotide substrate
ccacgaaggccgaaacg

SEQ ID NO: 3123 - RNA, 17 nt, artificial sequence
  misc_feature: oligonucleotide substrate
aggccgaaacggcucug

SEQ ID NO: 3124 - RNA, 17 nt, artificial sequence
  misc_feature: oligonucleotide substrate
ccgaaacggcucugggg

SEQ ID NO: 3125 - RNA, 17 nt, artificial sequence
  misc_feature: oligonucleotide substrate
uggggggagcgaguugg

SEQ ID NO: 3126 - RNA, 17 nt, artificial sequence
  misc_feature: oligonucleotide substrate
gggagcgaguugggcgg

SEQ ID NO: 3127 - RNA, 17 nt, artificial sequence
  misc_feature: oligonucleotide substrate
cgaguugggcggccacc

SEQ ID NO: 3128 - RNA, 17 nt, artificial sequence
  misc_feature: oligonucleotide substrate
guugggcggccacccac

SEQ ID NO: 3129 - RNA, 17 nt, artificial sequence
  misc_feature: oligonucleotide substrate
gggcggccacccacccu

SEQ ID NO: 3130 - RNA, 17 nt, artificial sequence
  misc_feature: oligonucleotide substrate
ggccacccacccuccca

SEQ ID NO: 3131 - RNA, 17 nt, artificial sequence
  misc_feature: oligonucleotide substrate
cucccaagauguugaac

SEQ ID NO: 3132 - RNA, 17 nt, artificial sequence
  misc_feature: oligonucleotide substrate
cccaagauguugaacag

SEQ ID NO: 3133 - RNA, 17 nt, artificial sequence
  misc_feature: oligonucleotide substrate
gauguugaacaggaggg

SEQ ID NO: 3134 - RNA, 17 nt, artificial sequence
  misc_feature: oligonucleotide substrate
acaggagggugcuuugg

SEQ ID NO: 3135 - RNA, 17 nt, artificial sequence
  misc_feature: oligonucleotide substrate
aggagggugcuuugggu

SEQ ID NO: 3136 - RNA, 17 nt, artificial sequence
  misc_feature: oligonucleotide substrate
ugcuuuggguggugagc

SEQ ID NO: 3137 - RNA, 17 nt, artificial sequence
  misc_feature: oligonucleotide substrate
uuuggguggugagcggg

SEQ ID NO: 3138 - RNA, 17 nt, artificial sequence
  misc_feature: oligonucleotide substrate
gguggugagcgggcugg

SEQ ID NO: 3139 - RNA, 17 nt, artificial sequence
  misc_feature: oligonucleotide substrate
gugagcgggcuggugau

SEQ ID NO: 3140 - RNA, 17 nt, artificial sequence
  misc_feature: oligonucleotide substrate
gcgggcuggugauggag

SEQ ID NO: 3141 - RNA, 17 nt, artificial sequence
  misc_feature: oligonucleotide substrate
ggcuggugauggaggcu

SEQ ID NO: 3142 - RNA, 17 nt, artificial sequence
  misc_feature: oligonucleotide substrate
ugauggaggcugugaau

SEQ ID NO: 3143 - RNA, 17 nt, artificial sequence
  misc_feature: oligonucleotide substrate
uggaggcugugaaugcc

SEQ ID NO: 3144 - RNA, 17 nt, artificial sequence
  misc_feature: oligonucleotide substrate
ggcugugaaugccauca

SEQ ID NO: 3145 - RNA, 17 nt, artificial sequence
  misc_feature: oligonucleotide substrate
cugugaaugccaucaau

SEQ ID NO: 3146 - RNA, 17 nt, artificial sequence
  misc_feature: oligonucleotide substrate
ugaaugccaucaaugau

SEQ ID NO: 3147 - RNA, 17 nt, artificial sequence
  misc_feature: oligonucleotide substrate
ugccaucaaugaugcua

SEQ ID NO: 3148 - RNA, 17 nt, artificial sequence
  misc_feature: oligonucleotide substrate
caucaaugaugcuaucg

SEQ ID NO: 3149 - RNA, 17 nt, artificial sequence
  misc_feature: oligonucleotide substrate
ucaaugaugcuaucgcg

SEQ ID NO: 3150 - RNA, 17 nt, artificial sequence
  misc_feature: oligonucleotide substrate
augaugcuaucgcgggg

SEQ ID NO: 3151 - RNA, 17 nt, artificial sequence
  misc_feature: oligonucleotide substrate
augcuaucgcgggguuc

SEQ ID NO: 3152 - RNA, 17 nt, artificial sequence
  misc_feature: oligonucleotide substrate
aucgcgggguucccagg

SEQ ID NO: 3153 - RNA, 17 nt, artificial sequence
  misc_feature: oligonucleotide substrate
guucccaggcagagugg

SEQ ID NO: 3154 - RNA, 17 nt, artificial sequence
  misc_feature: oligonucleotide substrate
caggcagaguggacaag

SEQ ID NO: 3155 - RNA, 17 nt, artificial sequence
  misc_feature: oligonucleotide substrate
cagaguggacaagccug

SEQ ID NO: 3156 - RNA, 17 nt, artificial sequence
  misc_feature: oligonucleotide substrate
guggacaagccugcuag

SEQ ID NO: 3157 - RNA, 17 nt, artificial sequence
  misc_feature: oligonucleotide substrate
acaagccugcuagguac

SEQ ID NO: 3158 - RNA, 17 nt, artificial sequence
  misc_feature: oligonucleotide substrate
ccugcuagguacuguau

SEQ ID NO: 3159 - RNA, 17 nt, artificial sequence
  misc_feature: oligonucleotide substrate
ugcuagguacuguaucc

SEQ ID NO: 3160 - RNA, 17 nt, artificial sequence
  misc_feature: oligonucleotide substrate
uagguacuguaucccgc

SEQ ID NO: 3161 - RNA, 17 nt, artificial sequence
  misc_feature: oligonucleotide substrate
gguacuguaucccgcug

SEQ ID NO: 3162 - RNA, 17 nt, artificial sequence
  misc_feature: oligonucleotide substrate
uguaucccgcugaugaa

SEQ ID NO: 3163 - RNA, 17 nt, artificial sequence
  misc_feature: oligonucleotide substrate
ucccgcugaugaaauuc

SEQ ID NO: 3164 - RNA, 17 nt, artificial sequence
  misc_feature: oligonucleotide substrate
cugaugaaauuccacau

SEQ ID NO: 3165 - RNA, 17 nt, artificial sequence
  misc_feature: oligonucleotide substrate
gaaauuccacaugugcu

SEQ ID NO: 3166 - RNA, 17 nt, artificial sequence
  misc_feature: oligonucleotide substrate
aauuccacaugugcuuc

SEQ ID NO: 3167 - RNA, 17 nt, artificial sequence
  misc_feature: oligonucleotide substrate
uuccacaugugcuucgc

SEQ ID NO: 3168 - RNA, 17 nt, artificial sequence
  misc_feature: oligonucleotide substrate
ccacaugugcuucgccc

SEQ ID NO: 3169 - RNA, 17 nt, artificial sequence
  misc_feature: oligonucleotide substrate
ugugcuucgcccagaaa

SEQ ID NO: 3170 - RNA, 17 nt, artificial sequence
  misc_feature: oligonucleotide substrate
cccagaaagccucaagg

SEQ ID NO: 3171 - RNA, 17 nt, artificial sequence
  misc_feature: oligonucleotide substrate
ccucaagggcucgccac

SEQ ID NO: 3172 - RNA, 17 nt, artificial sequence
  misc_feature: oligonucleotide substrate
aagggcucgccacuugg

SEQ ID NO: 3173 - RNA, 17 nt, artificial sequence
  misc_feature: oligonucleotide substrate
ggcucgccacuuggauu

SEQ ID NO: 3174 - RNA, 17 nt, artificial sequence
  misc_feature: oligonucleotide substrate
ccacuuggauuccacca

SEQ ID NO: 3175 - RNA, 17 nt, artificial sequence
  misc_feature: oligonucleotide substrate
uggauuccaccacggga

SEQ ID NO: 3176 - RNA, 17 nt, artificial sequence
  misc_feature: oligonucleotide substrate
auuccaccacgggagca

SEQ ID NO: 3177 - RNA, 17 nt, artificial sequence
  misc_feature: oligonucleotide substrate
ccacgggagcagcagcc

SEQ ID NO: 3178 - RNA, 17 nt, artificial sequence
  misc_feature: oligonucleotide substrate
cgggagcagcagccucc

SEQ ID NO: 3179 - RNA, 17 nt, artificial sequence
  misc_feature: oligonucleotide substrate
gagcagcagccuccgcu

SEQ ID NO: 3180 - RNA, 17 nt, artificial sequence
  misc_feature: oligonucleotide substrate
cagccuccgcuugguug

SEQ ID NO: 3181 - RNA, 17 nt, artificial sequence
  misc_feature: oligonucleotide substrate
uccgcuugguugguggc

SEQ ID NO: 3182 - RNA, 17 nt, artificial sequence
  misc_feature: oligonucleotide substrate
cuugguugguggcuguu

SEQ ID NO: 3183 - RNA, 17 nt, artificial sequence
  misc_feature: oligonucleotide substrate
gguugguggcuguuugc

SEQ ID NO: 3184 - RNA, 17 nt, artificial sequence
  misc_feature: oligonucleotide substrate
ugguggcuguuugcagc

SEQ ID NO: 3185 - RNA, 17 nt, artificial sequence
  misc_feature: oligonucleotide substrate
ggcuguuugcagcaauc

SEQ ID NO: 3186 - RNA, 17 nt, artificial sequence
  misc_feature: oligonucleotide substrate
uguuugcagcaauccga

SEQ ID NO: 3187 - RNA, 17 nt, artificial sequence
  misc_feature: oligonucleotide substrate
uugcagcaauccgagcg

SEQ ID NO: 3188 - RNA, 17 nt, artificial sequence
  misc_feature: oligonucleotide substrate
caauccgagcgccuucu

SEQ ID NO: 3189 - RNA, 17 nt, artificial sequence
  misc_feature: oligonucleotide substrate
auccgagcgccuucugc

SEQ ID NO: 3190 - RNA, 17 nt, artificial sequence
  misc_feature: oligonucleotide substrate
cgccuucugcuugaacu

SEQ ID NO: 3191 - RNA, 17 nt, artificial sequence
  misc_feature: oligonucleotide substrate
cugcuugaacugcucgg

SEQ ID NO: 3192 - RNA, 17 nt, artificial sequence
  misc_feature: oligonucleotide substrate
cuugaacugcucggcga

SEQ ID NO: 3193 - RNA, 17 nt, artificial sequence
  misc_feature: oligonucleotide substrate
acugcucggcgagcugc

SEQ ID NO: 3194 - RNA, 17 nt, artificial sequence
  misc_feature: oligonucleotide substrate
cucggcgagcugcaucc

SEQ ID NO: 3195 - RNA, 17 nt, artificial sequence
  misc_feature: oligonucleotide substrate
ggcgagcugcauccccu

SEQ ID NO: 3196 - RNA, 17 nt, artificial sequence
  misc_feature: oligonucleotide substrate
cgagcugcauccccugu

SEQ ID NO: 3197 - RNA, 17 nt, artificial sequence
  misc_feature: oligonucleotide substrate
cauccccuguucgaugu

SEQ ID NO: 3198 - RNA, 17 nt, artificial sequence
  misc_feature: oligonucleotide substrate
ccuguucgauguaaggg

SEQ ID NO: 3199 - RNA, 17 nt, artificial sequence
  misc_feature: oligonucleotide substrate
uguucgauguaagggag

SEQ ID NO: 3200 - RNA, 17 nt, artificial sequence
  misc_feature: oligonucleotide substrate
uaagggaggugugaggc

SEQ ID NO: 3201 - RNA, 17 nt, artificial sequence
  misc_feature: oligonucleotide substrate
agggaggugugaggcac

SEQ ID NO: 3202 - RNA, 17 nt, artificial sequence
  misc_feature: oligonucleotide substrate
ggugugaggcacacucc

SEQ ID NO: 3203 - RNA, 17 nt, artificial sequence
  misc_feature: oligonucleotide substrate
ugugaggcacacuccuc

SEQ ID NO: 3204 - RNA, 17 nt, artificial sequence
  misc_feature: oligonucleotide substrate
ugaggcacacuccucca

SEQ ID NO: 3205 - RNA, 17 nt, artificial sequence
  misc_feature: oligonucleotide substrate
acuccuccaucucaucg

SEQ ID NO: 3206 - RNA, 17 nt, artificial sequence
  misc_feature: oligonucleotide substrate
uccaucucaucgaacuc

SEQ ID NO: 3207 - RNA, 17 nt, artificial sequence
  misc_feature: oligonucleotide substrate
cucaucgaacuccuggu

SEQ ID NO: 3208 - RNA, 17 nt, artificial sequence
  misc_feature: oligonucleotide substrate
aacuccugguagagagc

SEQ ID NO: 3209 - RNA, 17 nt, artificial sequence
  misc_feature: oligonucleotide substrate
gguagagagccucccug

SEQ ID NO: 3210 - RNA, 17 nt, artificial sequence
  misc_feature: oligonucleotide substrate
gccucccugucggggau

SEQ ID NO: 3211 - RNA, 17 nt, artificial sequence
  misc_feature: oligonucleotide substrate
ugucggggauaacagcc

SEQ ID NO: 3212 - RNA, 17 nt, artificial sequence
  misc_feature: oligonucleotide substrate
cggggauaacagccggc

SEQ ID NO: 3213 - RNA, 17 nt, artificial sequence
  misc_feature: oligonucleotide substrate
ggauaacagccggcuuc

SEQ ID NO: 3214 - RNA, 17 nt, artificial sequence
  misc_feature: oligonucleotide substrate
aacagccggcuucccgg

SEQ ID NO: 3215 - RNA, 17 nt, artificial sequence
  misc_feature: oligonucleotide substrate
cuucccggacaagauga

SEQ ID NO: 3216 - RNA, 17 nt, artificial sequence
  misc_feature: oligonucleotide substrate
cggacaagaugauucug

SEQ ID NO: 3217 - RNA, 17 nt, artificial sequence
  misc_feature: oligonucleotide substrate
acaagaugauucugccc

SEQ ID NO: 3218 - RNA, 17 nt, artificial sequence
  misc_feature: oligonucleotide substrate
augauucugcccacaau

SEQ ID NO: 3219 - RNA, 17 nt, artificial sequence
  misc_feature: oligonucleotide substrate
uucugcccacaaugacc

SEQ ID NO: 3220 - RNA, 17 nt, artificial sequence
  misc_feature: oligonucleotide substrate
ugcccacaaugaccacg

SEQ ID NO: 3221 - RNA, 17 nt, artificial sequence
  misc_feature: oligonucleotide substrate
ccacaaugaccacgcug

SEQ ID NO: 3222 - RNA, 17 nt, artificial sequence
  misc_feature: oligonucleotide substrate
caaugaccacgcugccu

SEQ ID NO: 3223 - RNA, 17 nt, artificial sequence
  misc_feature: oligonucleotide substrate
augaccacgcugccugu

SEQ ID NO: 3224 - RNA, 17 nt, artificial sequence
  misc_feature: oligonucleotide substrate
accacgcugccugucgu

SEQ ID NO: 3225 - RNA, 17 nt, artificial sequence
  misc_feature: oligonucleotide substrate
cgcugccugucgucagg

SEQ ID NO: 3226 - RNA, 17 nt, artificial sequence
  misc_feature: oligonucleotide substrate
ugccugucgucaggcaa

SEQ ID NO: 3227 - RNA, 17 nt, artificial sequence
  misc_feature: oligonucleotide substrate
gucgucaggcaauacgc

SEQ ID NO: 3228 - RNA, 17 nt, artificial sequence
  misc_feature: oligonucleotide substrate
gucaggcaauacgcggu

SEQ ID NO: 3229 - RNA, 17 nt, artificial sequence
  misc_feature: oligonucleotide substrate
caggcaauacgcgguca

SEQ ID NO: 3230 - RNA, 17 nt, artificial sequence
  misc_feature: oligonucleotide substrate
ggcaauacgcggucaga

SEQ ID NO: 3231 - RNA, 17 nt, artificial sequence
  misc_feature: oligonucleotide substrate
aauacgcggucagagcu

SEQ ID NO: 3232 - RNA, 17 nt, artificial sequence
  misc_feature: oligonucleotide substrate
cggucagagcugccagg

SEQ ID NO: 3233 - RNA, 17 nt, artificial sequence
  misc_feature: oligonucleotide substrate
ucagagcugccaggacg

SEQ ID NO: 3234 - RNA, 17 nt, artificial sequence
  misc_feature: oligonucleotide substrate
cugccaggacgccaccu

SEQ ID NO: 3235 - RNA, 17 nt, artificial sequence
  misc_feature: oligonucleotide substrate
gccaggacgccaccuac

SEQ ID NO: 3236 - RNA, 17 nt, artificial sequence
  misc_feature: oligonucleotide substrate
aggacgccaccuacuag

SEQ ID NO: 3237 - RNA, 17 nt, artificial sequence
  misc_feature: oligonucleotide substrate
cgccaccuacuagcacc

SEQ ID NO: 3238 - RNA, 17 nt, artificial sequence
  misc_feature: oligonucleotide substrate
accuacuagcacccagg

SEQ ID NO: 3239 - RNA, 17 nt, artificial sequence
  misc_feature: oligonucleotide substrate
cuacuagcacccaggug

SEQ ID NO: 3240 - RNA, 17 nt, artificial sequence
  misc_feature: oligonucleotide substrate
gcacccaggugcuggug

SEQ ID NO: 3241 - RNA, 17 nt, artificial sequence
  misc_feature: oligonucleotide substrate
acccaggugcuggugac

SEQ ID NO: 3242 - RNA, 17 nt, artificial sequence
  misc_feature: oligonucleotide substrate
aggugcuggugacgacc

SEQ ID NO: 3243 - RNA, 17 nt, artificial sequence
  misc_feature: oligonucleotide substrate
ugcuggugacgaccucc

SEQ ID NO: 3244 - RNA, 17 nt, artificial sequence
  misc_feature: oligonucleotide substrate
uggugacgaccuccagg

SEQ ID NO: 3245 - RNA, 17 nt, artificial sequence
  misc_feature: oligonucleotide substrate
accuccaggucagccga

SEQ ID NO: 3246 - RNA, 17 nt, artificial sequence
  misc_feature: oligonucleotide substrate
ccaggucagccgacaug

SEQ ID NO: 3247 - RNA, 17 nt, artificial sequence
  misc_feature: oligonucleotide substrate
gucagccgacaugcaug

SEQ ID NO: 3248 - RNA, 17 nt, artificial sequence
  misc_feature: oligonucleotide substrate
cagccgacaugcauguc

SEQ ID NO: 3249 - RNA, 17 nt, artificial sequence
  misc_feature: oligonucleotide substrate
gccgacaugcaugucau

SEQ ID NO: 3250 - RNA, 17 nt, artificial sequence
  misc_feature: oligonucleotide substrate
cgacaugcaugucauga

SEQ ID NO: 3251 - RNA, 17 nt, artificial sequence
  misc_feature: oligonucleotide substrate
acaugcaugucaugaug

SEQ ID NO: 3252 - RNA, 17 nt, artificial sequence
  misc_feature: oligonucleotide substrate
ugcaugucaugauguau

SEQ ID NO: 3253 - RNA, 17 nt, artificial sequence
  misc_feature: oligonucleotide substrate
augucaugauguauuug

SEQ ID NO: 3254 - RNA, 17 nt, artificial sequence
  misc_feature: oligonucleotide substrate
gucaugauguauuuggu

SEQ ID NO: 3255 - RNA, 17 nt, artificial sequence
  misc_feature: oligonucleotide substrate
caugauguauuugguua

SEQ ID NO: 3256 - RNA, 17 nt, artificial sequence
  misc_feature: oligonucleotide substrate
uguauuugguuaugggg

SEQ ID NO: 3257 - RNA, 17 nt, artificial sequence
  misc_feature: oligonucleotide substrate
auuugguuauggggugu

SEQ ID NO: 3258 - RNA, 17 nt, artificial sequence
  misc_feature: oligonucleotide substrate
guuauggggugugugag

SEQ ID NO: 3259 - RNA, 17 nt, artificial sequence
  misc_feature: oligonucleotide substrate
uauggggugugugaggg

SEQ ID NO: 3260 - RNA, 17 nt, artificial sequence
  misc_feature: oligonucleotide substrate
uggggugugugagggug

SEQ ID NO: 3261 - RNA, 17 nt, artificial sequence
  misc_feature: oligonucleotide substrate
gugugagggugacauca

SEQ ID NO: 3262 - RNA, 17 nt, artificial sequence
  misc_feature: oligonucleotide substrate
ugagggugacaucauuu

SEQ ID NO: 3263 - RNA, 17 nt, artificial sequence
  misc_feature: oligonucleotide substrate
agggugacaucauuuug

SEQ ID NO: 3264 - RNA, 17 nt, artificial sequence
  misc_feature: oligonucleotide substrate
gugacaucauuuuggac

SEQ ID NO: 3265 - RNA, 17 nt, artificial sequence
  misc_feature: oligonucleotide substrate
cauuuuggacggcuccu

SEQ ID NO: 3266 - RNA, 17 nt, artificial sequence
  misc_feature: oligonucleotide substrate
uuuggacggcuccuagc

SEQ ID NO: 3267 - RNA, 17 nt, artificial sequence
  misc_feature: oligonucleotide substrate
ggcuccuagccuauaca

SEQ ID NO: 3268 - RNA, 17 nt, artificial sequence
  misc_feature: oligonucleotide substrate
ccuagccuauacagcag

SEQ ID NO: 3269 - RNA, 17 nt, artificial sequence
  misc_feature: oligonucleotide substrate
uagccuauacagcaggg

SEQ ID NO: 3270 - RNA, 17 nt, artificial sequence
  misc_feature: oligonucleotide substrate
ccuauacagcaggggug

SEQ ID NO: 3271 - RNA, 17 nt, artificial sequence
  misc_feature: oligonucleotide substrate
cagcagggguguuggcc

SEQ ID NO: 3272 - RNA, 17 nt, artificial sequence
  misc_feature: oligonucleotide substrate
gcagggguguuggcccg

SEQ ID NO: 3273 - RNA, 17 nt, artificial sequence
  misc_feature: oligonucleotide substrate
ggguguuggcccgugua

SEQ ID NO: 3274 - RNA, 17 nt, artificial sequence
  misc_feature: oligonucleotide substrate
guuggcccguguagcgu

SEQ ID NO: 3275 - RNA, 17 nt, artificial sequence
  misc_feature: oligonucleotide substrate
uggcccguguagcguag

SEQ ID NO: 3276 - RNA, 17 nt, artificial sequence
  misc_feature: oligonucleotide substrate
cccguguagcguaggcu

SEQ ID NO: 3277 - RNA, 17 nt, artificial sequence
  misc_feature: oligonucleotide substrate
cguguagcguaggcuuu

SEQ ID NO: 3278 - RNA, 17 nt, artificial sequence
  misc_feature: oligonucleotide substrate
uagcguaggcuuuagcc

SEQ ID NO: 3279 - RNA, 17 nt, artificial sequence
  misc_feature: oligonucleotide substrate
aggcuuuagccguguga

SEQ ID NO: 3280 - RNA, 17 nt, artificial sequence
  misc_feature: oligonucleotide substrate
cuuuagccgugugagac

SEQ ID NO: 3281 - RNA, 17 nt, artificial sequence
  misc_feature: oligonucleotide substrate
uuagccgugugagacac

SEQ ID NO: 3282 - RNA, 17 nt, artificial sequence
  misc_feature: oligonucleotide substrate
cgugugagacacuucca

SEQ ID NO: 3283 - RNA, 17 nt, artificial sequence
  misc_feature: oligonucleotide substrate
ugugagacacuuccaca

SEQ ID NO: 3284 - RNA, 17 nt, artificial sequence
  misc_feature: oligonucleotide substrate
acacuuccacauuugau

SEQ ID NO: 3285 - RNA, 17 nt, artificial sequence
  misc_feature: oligonucleotide substrate
acuuccacauuugaucc

SEQ ID NO: 3286 - RNA, 17 nt, artificial sequence
  misc_feature: oligonucleotide substrate
cacauuugaucccacga

SEQ ID NO: 3287 - RNA, 17 nt, artificial sequence
  misc_feature: oligonucleotide substrate
uugaucccacgaugggg

SEQ ID NO: 3288 - RNA, 17 nt, artificial sequence
  misc_feature: oligonucleotide substrate
aucccacgaugggggug

SEQ ID NO: 3289 - RNA, 17 nt, artificial sequence
  misc_feature: oligonucleotide substrate
cgauggggguggagccu

SEQ ID NO: 3290 - RNA, 17 nt, artificial sequence
  misc_feature: oligonucleotide substrate
gggguggagccugagcc

SEQ ID NO: 3291 - RNA, 17 nt, artificial sequence
  misc_feature: oligonucleotide substrate
gagccugagcccuggcg

SEQ ID NO: 3292 - RNA, 17 nt, artificial sequence
  misc_feature: oligonucleotide substrate
gagcccuggcgcacacu

SEQ ID NO: 3293 - RNA, 17 nt, artificial sequence
  misc_feature: oligonucleotide substrate
gcccuggcgcacacugu

SEQ ID NO: 3294 - RNA, 17 nt, artificial sequence
  misc_feature: oligonucleotide substrate
ccuggcgcacacugugg

SEQ ID NO: 3295 - RNA, 17 nt, artificial sequence
  misc_feature: oligonucleotide substrate
uggcgcacacuguggcu

SEQ ID NO: 3296 - RNA, 17 nt, artificial sequence
  misc_feature: oligonucleotide substrate
cgcacacuguggcuugg

SEQ ID NO: 3297 - RNA, 17 nt, artificial sequence
  misc_feature: oligonucleotide substrate
acacuguggcuugguau

SEQ ID NO: 3298 - RNA, 17 nt, artificial sequence
  misc_feature: oligonucleotide substrate
guggcuugguaugcuac

SEQ ID NO: 3299 - RNA, 17 nt, artificial sequence
  misc_feature: oligonucleotide substrate
ggcuugguaugcuacca

SEQ ID NO: 3300 - RNA, 17 nt, artificial sequence
  misc_feature: oligonucleotide substrate
cuugguaugcuaccagg

SEQ ID NO: 3301 - RNA, 17 nt, artificial sequence
  misc_feature: oligonucleotide substrate
gguaugcuaccagguag

SEQ ID NO: 3302 - RNA, 17 nt, artificial sequence
  misc_feature: oligonucleotide substrate
gcuaccagguaggggag

SEQ ID NO: 3303 - RNA, 17 nt, artificial sequence
  misc_feature: oligonucleotide substrate
uaggggagguuuucucc

SEQ ID NO: 3304 - RNA, 17 nt, artificial sequence
  misc_feature: oligonucleotide substrate
uuucuccugccugcuug

SEQ ID NO: 3305 - RNA, 17 nt, artificial sequence
  misc_feature: oligonucleotide substrate
uccugccugcuuggucu

SEQ ID NO: 3306 - RNA, 17 nt, artificial sequence
  misc_feature: oligonucleotide substrate
ccugcuuggucugggac

SEQ ID NO: 3307 - RNA, 17 nt, artificial sequence
  misc_feature: oligonucleotide substrate
ggucugggacaagaagu

SEQ ID NO: 3308 - RNA, 17 nt, artificial sequence
  misc_feature: oligonucleotide substrate
gacaagaagugggcauc

SEQ ID NO: 3309 - RNA, 17 nt, artificial sequence
  misc_feature: oligonucleotide substrate
agaagugggcaucuaug

SEQ ID NO: 3310 - RNA, 17 nt, artificial sequence
  misc_feature: oligonucleotide substrate
aagugggcaucuaugug

SEQ ID NO: 3311 - RNA, 17 nt, artificial sequence
  misc_feature: oligonucleotide substrate
gggcaucuaugugggug

SEQ ID NO: 3312 - RNA, 17 nt, artificial sequence
  misc_feature: oligonucleotide substrate
gcaucuaugugggugag

SEQ ID NO: 3313 - RNA, 17 nt, artificial sequence
  misc_feature: oligonucleotide substrate
cuaugugggugaggccu

SEQ ID NO: 3314 - RNA, 17 nt, artificial sequence
  misc_feature: oligonucleotide substrate
ugggugaggccugugaa

SEQ ID NO: 3315 - RNA, 17 nt, artificial sequence
  misc_feature: oligonucleotide substrate
ugaggccugugaagaca

SEQ ID NO: 3316 - RNA, 17 nt, artificial sequence
  misc_feature: oligonucleotide substrate
cugugaagacacccucc

SEQ ID NO: 3317 - RNA, 17 nt, artificial sequence
  misc_feature: oligonucleotide substrate
gugaagacacccuccca

SEQ ID NO: 3318 - RNA, 17 nt, artificial sequence
  misc_feature: oligonucleotide substrate
cucccagaacuccagau

SEQ ID NO: 3319 - RNA, 17 nt, artificial sequence
  misc_feature: oligonucleotide substrate
aacuccagaugguccug

SEQ ID NO: 3320 - RNA, 17 nt, artificial sequence
  misc_feature: oligonucleotide substrate
uccagaugguccuggca

SEQ ID NO: 3321 - RNA, 17 nt, artificial sequence
  misc_feature: oligonucleotide substrate
ugguccuggcagaaggg

SEQ ID NO: 3322 - RNA, 17 nt, artificial sequence
  misc_feature: oligonucleotide substrate
gcagaagggcaacccug

SEQ ID NO: 3323 - RNA, 17 nt, artificial sequence
  misc_feature: oligonucleotide substrate
gaagggcaacccuggug

SEQ ID NO: 3324 - RNA, 17 nt, artificial sequence
  misc_feature: oligonucleotide substrate
caacccugguguauuua

SEQ ID NO: 3325 - RNA, 17 nt, artificial sequence
  misc_feature: oligonucleotide substrate
acccugguguauuuagg

SEQ ID NO: 3326 - RNA, 17 nt, artificial sequence
  misc_feature: oligonucleotide substrate
ccugguguauuuaggua

SEQ ID NO: 3327 - RNA, 17 nt, artificial sequence
  misc_feature: oligonucleotide substrate
guauuuagguaagcccg

SEQ ID NO: 3328 - RNA, 17 nt, artificial sequence
  misc_feature: oligonucleotide substrate
uuagguaagcccgcaac

SEQ ID NO: 3329 - RNA, 17 nt, artificial sequence
  misc_feature: oligonucleotide substrate
guaagcccgcaaccuaa

SEQ ID NO: 3330 - RNA, 17 nt, artificial sequence
  misc_feature: oligonucleotide substrate
agcccgcaaccuaacgg

SEQ ID NO: 3331 - RNA, 17 nt, artificial sequence
  misc_feature: oligonucleotide substrate
gcaaccuaacggagguc

SEQ ID NO: 3332 - RNA, 17 nt, artificial sequence
  misc_feature: oligonucleotide substrate
uaacggaggucucggcg

SEQ ID NO: 3333 - RNA, 17 nt, artificial sequence
  misc_feature: oligonucleotide substrate
aggucucggcgggcgug

SEQ ID NO: 3334 - RNA, 17 nt, artificial sequence
  misc_feature: oligonucleotide substrate
cucggcgggcgugagcu

SEQ ID NO: 3335 - RNA, 17 nt, artificial sequence
  misc_feature: oligonucleotide substrate
cggcgggcgugagcucg

SEQ ID NO: 3336 - RNA, 17 nt, artificial sequence
  misc_feature: oligonucleotide substrate
gggcgugagcucguacc

SEQ ID NO: 3337 - RNA, 17 nt, artificial sequence
  misc_feature: oligonucleotide substrate
gugagcucguaccaagc

SEQ ID NO: 3338 - RNA, 17 nt, artificial sequence
  misc_feature: oligonucleotide substrate
gagcucguaccaagcac

SEQ ID NO: 3339 - RNA, 17 nt, artificial sequence
  misc_feature: oligonucleotide substrate
cguaccaagcacauccc

SEQ ID NO: 3340 - RNA, 17 nt, artificial sequence
  misc_feature: oligonucleotide substrate
uaccaagcacaucccgc

SEQ ID NO: 3341 - RNA, 17 nt, artificial sequence
  misc_feature: oligonucleotide substrate
ccaagcacaucccgcgu

SEQ ID NO: 3342 - RNA, 17 nt, artificial sequence
  misc_feature: oligonucleotide substrate
cacaucccgcgucauag

SEQ ID NO: 3343 - RNA, 17 nt, artificial sequence
  misc_feature: oligonucleotide substrate
caucccgcgucauagca

SEQ ID NO: 3344 - RNA, 17 nt, artificial sequence
  misc_feature: oligonucleotide substrate
cccgcgucauagcacuc

SEQ ID NO: 3345 - RNA, 17 nt, artificial sequence
  misc_feature: oligonucleotide substrate
gcgucauagcacucaca

SEQ ID NO: 3346 - RNA, 17 nt, artificial sequence
  misc_feature: oligonucleotide substrate
gucauagcacucacaca

SEQ ID NO: 3347 - RNA, 17 nt, artificial sequence
  misc_feature: oligonucleotide substrate
uagcacucacacaggac

SEQ ID NO: 3348 - RNA, 17 nt, artificial sequence
  misc_feature: oligonucleotide substrate
gcacucacacaggaccg

SEQ ID NO: 3349 - RNA, 17 nt, artificial sequence
  misc_feature: oligonucleotide substrate
cacacaggaccgaggag

SEQ ID NO: 3350 - RNA, 17 nt, artificial sequence
  misc_feature: oligonucleotide substrate
accgaggagucgaacau

SEQ ID NO: 3351 - RNA, 17 nt, artificial sequence
  misc_feature: oligonucleotide substrate
ggagucgaacaugcccg

SEQ ID NO: 3352 - RNA, 17 nt, artificial sequence
  misc_feature: oligonucleotide substrate
agucgaacaugcccgaa

SEQ ID NO: 3353 - RNA, 17 nt, artificial sequence
  misc_feature: oligonucleotide substrate
ucgaacaugcccgaagg

SEQ ID NO: 3354 - RNA, 17 nt, artificial sequence
  misc_feature: oligonucleotide substrate
gcccgaaggccgcucuc

SEQ ID NO: 3355 - RNA, 17 nt, artificial sequence
  misc_feature: oligonucleotide substrate
cgaaggccgcucuccug

SEQ ID NO: 3356 - RNA, 17 nt, artificial sequence
  misc_feature: oligonucleotide substrate
cuccuggagucacaaac

SEQ ID NO: 3357 - RNA, 17 nt, artificial sequence
  misc_feature: oligonucleotide substrate
cuggagucacaaaccug

SEQ ID NO: 3358 - RNA, 17 nt, artificial sequence
  misc_feature: oligonucleotide substrate
agucacaaaccuguaua

SEQ ID NO: 3359 - RNA, 17 nt, artificial sequence
  misc_feature: oligonucleotide substrate
acaaaccuguauaugcc

SEQ ID NO: 3360 - RNA, 17 nt, artificial sequence
  misc_feature: oligonucleotide substrate
aaaccuguauaugccuc

SEQ ID NO: 3361 - RNA, 17 nt, artificial sequence
  misc_feature: oligonucleotide substrate
accuguauaugccucuc

SEQ ID NO: 3362 - RNA, 17 nt, artificial sequence
  misc_feature: oligonucleotide substrate
cuguauaugccucuccu

SEQ ID NO: 3363 - RNA, 17 nt, artificial sequence
  misc_feature: oligonucleotide substrate
ccucuccugccccuacc

SEQ ID NO: 3364 - RNA, 17 nt, artificial sequence
  misc_feature: oligonucleotide substrate
cugccccuaccgguccu

SEQ ID NO: 3365 - RNA, 17 nt, artificial sequence
  misc_feature: oligonucleotide substrate
cccuaccgguccuaccu

SEQ ID NO: 3366 - RNA, 17 nt, artificial sequence
  misc_feature: oligonucleotide substrate
ccgguccuaccucgccu

SEQ ID NO: 3367 - RNA, 17 nt, artificial sequence
  misc_feature: oligonucleotide substrate
ccuaccucgccucugcg

SEQ ID NO: 3368 - RNA, 17 nt, artificial sequence
  misc_feature: oligonucleotide substrate
ucgccucugcgagcggg

SEQ ID NO: 3369 - RNA, 17 nt, artificial sequence
  misc_feature: oligonucleotide substrate
cucugcgagcgggacac

SEQ ID NO: 3370 - RNA, 17 nt, artificial sequence
  misc_feature: oligonucleotide substrate
cgagcgggacacugcgu

SEQ ID NO: 3371 - RNA, 17 nt, artificial sequence
  misc_feature: oligonucleotide substrate
agcgggacacugcgucu

SEQ ID NO: 3372 - RNA, 17 nt, artificial sequence
  misc_feature: oligonucleotide substrate
gggacacugcgucuugg

SEQ ID NO: 3373 - RNA, 17 nt, artificial sequence
  misc_feature: oligonucleotide substrate
gacacugcgucuugggg

SEQ ID NO: 3374 - RNA, 17 nt, artificial sequence
  misc_feature: oligonucleotide substrate
gucuuggggcacggucg

SEQ ID NO: 3375 - RNA, 17 nt, artificial sequence
  misc_feature: oligonucleotide substrate
cuuggggcacggucguc

SEQ ID NO: 3376 - RNA, 17 nt, artificial sequence
  misc_feature: oligonucleotide substrate
ggggcacggucgucguc

SEQ ID NO: 3377 - RNA, 17 nt, artificial sequence
  misc_feature: oligonucleotide substrate
gcacggucgucgucuca

SEQ ID NO: 3378 - RNA, 17 nt, artificial sequence
  misc_feature: oligonucleotide substrate
cggucgucgucucaaug

SEQ ID NO: 3379 - RNA, 17 nt, artificial sequence
  misc_feature: oligonucleotide substrate
ucgucucaauggugaag

SEQ ID NO: 3380 - RNA, 17 nt, artificial sequence
  misc_feature: oligonucleotide substrate
ucucaauggugaaggua

SEQ ID NO: 3381 - RNA, 17 nt, artificial sequence
  misc_feature: oligonucleotide substrate
uggugaagguagggucc

SEQ ID NO: 3382 - RNA, 17 nt, artificial sequence
  misc_feature: oligonucleotide substrate
aagguaggguccaagcu

SEQ ID NO: 3383 - RNA, 17 nt, artificial sequence
  misc_feature: oligonucleotide substrate
ggguccaagcugaaguc

SEQ ID NO: 3384 - RNA, 17 nt, artificial sequence
  misc_feature: oligonucleotide substrate
aagcugaagucgacugu

SEQ ID NO: 3385 - RNA, 17 nt, artificial sequence
  misc_feature: oligonucleotide substrate
ugaagucgacuguuugg

SEQ ID NO: 3386 - RNA, 17 nt, artificial sequence
  misc_feature: oligonucleotide substrate
agucgacuguuugggug

SEQ ID NO: 3387 - RNA, 17 nt, artificial sequence
  misc_feature: oligonucleotide substrate
cuguuugggugacacau

SEQ ID NO: 3388 - RNA, 17 nt, artificial sequence
  misc_feature: oligonucleotide substrate
uuugggugacacaugua

SEQ ID NO: 3389 - RNA, 17 nt, artificial sequence
  misc_feature: oligonucleotide substrate
ugggugacacauguauu

SEQ ID NO: 3390 - RNA, 17 nt, artificial sequence
  misc_feature: oligonucleotide substrate
ggugacacauguauuac

SEQ ID NO: 3391 - RNA, 17 nt, artificial sequence
  misc_feature: oligonucleotide substrate
ugacacauguauuacag

SEQ ID NO: 3392 - RNA, 17 nt, artificial sequence
  misc_feature: oligonucleotide substrate
acacauguauuacaguc

SEQ ID NO: 3393 - RNA, 17 nt, artificial sequence
  misc_feature: oligonucleotide substrate
cauguauuacagucgau

SEQ ID NO: 3394 - RNA, 17 nt, artificial sequence
  misc_feature: oligonucleotide substrate
guauuacagucgaucac

SEQ ID NO: 3395 - RNA, 17 nt, artificial sequence
  misc_feature: oligonucleotide substrate
uacagucgaucaccgag

SEQ ID NO: 3396 - RNA, 17 nt, artificial sequence
  misc_feature: oligonucleotide substrate
agucgaucaccgaguca

SEQ ID NO: 3397 - RNA, 17 nt, artificial sequence
  misc_feature: oligonucleotide substrate
aucaccgagucaaaauc

SEQ ID NO: 3398 - RNA, 17 nt, artificial sequence
  misc_feature: oligonucleotide substrate
gagucaaaaucgccggu

SEQ ID NO: 3399 - RNA, 17 nt, artificial sequence
  misc_feature: oligonucleotide substrate
ucaaaaucgccgguaua

SEQ ID NO: 3400 - RNA, 17 nt, artificial sequence
  misc_feature: oligonucleotide substrate
aaucgccgguauagccc

SEQ ID NO: 3401 - RNA, 17 nt, artificial sequence
  misc_feature: oligonucleotide substrate
ucgccgguauagcccgu

SEQ ID NO: 3402 - RNA, 17 nt, artificial sequence
  misc_feature: oligonucleotide substrate
ccgguauagcccgucau

SEQ ID NO: 3403 - RNA, 17 nt, artificial sequence
  misc_feature: oligonucleotide substrate
uauagcccgucauuaga

SEQ ID NO: 3404 - RNA, 17 nt, artificial sequence
  misc_feature: oligonucleotide substrate
agcccgucauuagagcg

SEQ ID NO: 3405 - RNA, 17 nt, artificial sequence
  misc_feature: oligonucleotide substrate
ucauuagagcgucuguu

SEQ ID NO: 3406 - RNA, 17 nt, artificial sequence
  misc_feature: oligonucleotide substrate
auuagagcgucuguugc

SEQ ID NO: 3407 - RNA, 17 nt, artificial sequence
  misc_feature: oligonucleotide substrate
gagcgucuguugccacg

SEQ ID NO: 3408 - RNA, 17 nt, artificial sequence
  misc_feature: oligonucleotide substrate
cgucuguugccacgaca

SEQ ID NO: 3409 - RNA, 17 nt, artificial sequence
  misc_feature: oligonucleotide substrate
cuguugccacgacaacg

SEQ ID NO: 3410 - RNA, 17 nt, artificial sequence
  misc_feature: oligonucleotide substrate
uugccacgacaacgacg

SEQ ID NO: 3411 - RNA, 17 nt, artificial sequence
  misc_feature: oligonucleotide substrate
ccacgacaacgacgucc

SEQ ID NO: 3412 - RNA, 17 nt, artificial sequence
  misc_feature: oligonucleotide substrate
cgacaacgacguccccg

SEQ ID NO: 3413 - RNA, 17 nt, artificial sequence
  misc_feature: oligonucleotide substrate
acaacgacguccccgcu

SEQ ID NO: 3414 - RNA, 17 nt, artificial sequence
  misc_feature: oligonucleotide substrate
acguccccgcuggccgg

SEQ ID NO: 3415 - RNA, 17 nt, artificial sequence
  misc_feature: oligonucleotide substrate
ccccgcuggccgguaug

SEQ ID NO: 3416 - RNA, 17 nt, artificial sequence
  misc_feature: oligonucleotide substrate
gcuggccgguaugacgg

SEQ ID NO: 3417 - RNA, 17 nt, artificial sequence
  misc_feature: oligonucleotide substrate
uggccgguaugacggac

SEQ ID NO: 3418 - RNA, 17 nt, artificial sequence
  misc_feature: oligonucleotide substrate
ccgguaugacggacacg

SEQ ID NO: 3419 - RNA, 17 nt, artificial sequence
  misc_feature: oligonucleotide substrate
uaugacggacacgucga

SEQ ID NO: 3420 - RNA, 17 nt, artificial sequence
  misc_feature: oligonucleotide substrate
ugacggacacgucgaga

SEQ ID NO: 3421 - RNA, 17 nt, artificial sequence
  misc_feature: oligonucleotide substrate
acggacacgucgagacc

SEQ ID NO: 3422 - RNA, 17 nt, artificial sequence
  misc_feature: oligonucleotide substrate
acgucgagaccccggua

SEQ ID NO: 3423 - RNA, 17 nt, artificial sequence
  misc_feature: oligonucleotide substrate
agaccccgguaauacgc

SEQ ID NO: 3424 - RNA, 17 nt, artificial sequence
  misc_feature: oligonucleotide substrate
ccccgguaauacgcuac

SEQ ID NO: 3425 - RNA, 17 nt, artificial sequence
  misc_feature: oligonucleotide substrate
ccgguaauacgcuacag

SEQ ID NO: 3426 - RNA, 17 nt, artificial sequence
  misc_feature: oligonucleotide substrate
gguaauacgcuacagcg

SEQ ID NO: 3427 - RNA, 17 nt, artificial sequence
  misc_feature: oligonucleotide substrate
aauacgcuacagcguua

SEQ ID NO: 3428 - RNA, 17 nt, artificial sequence
  misc_feature: oligonucleotide substrate
acgcuacagcguuaagu

SEQ ID NO: 3429 - RNA, 17 nt, artificial sequence
  misc_feature: oligonucleotide substrate
gcuacagcguuaagucc

SEQ ID NO: 3430 - RNA, 17 nt, artificial sequence
  misc_feature: oligonucleotide substrate
agcguuaaguccgaggc

SEQ ID NO: 3431 - RNA, 17 nt, artificial sequence
  misc_feature: oligonucleotide substrate
aguccgaggcccgacag

SEQ ID NO: 3432 - RNA, 17 nt, artificial sequence
  misc_feature: oligonucleotide substrate
gaggcccgacagcuuug

SEQ ID NO: 3433 - RNA, 17 nt, artificial sequence
  misc_feature: oligonucleotide substrate
gcccgacagcuuugcag

SEQ ID NO: 3434 - RNA, 17 nt, artificial sequence
  misc_feature: oligonucleotide substrate
acagcuuugcagcgagc

SEQ ID NO: 3435 - RNA, 17 nt, artificial sequence
  misc_feature: oligonucleotide substrate
gcuuugcagcgagcucg

SEQ ID NO: 3436 - RNA, 17 nt, artificial sequence
  misc_feature: oligonucleotide substrate
ugcagcgagcucgucac

SEQ ID NO: 3437 - RNA, 17 nt, artificial sequence
  misc_feature: oligonucleotide substrate
gcgagcucgucacauuu

SEQ ID NO: 3438 - RNA, 17 nt, artificial sequence
  misc_feature: oligonucleotide substrate
agcucgucacauuucuu

SEQ ID NO: 3439 - RNA, 17 nt, artificial sequence
  misc_feature: oligonucleotide substrate
cucgucacauuucuucu

SEQ ID NO: 3440 - RNA, 17 nt, artificial sequence
  misc_feature: oligonucleotide substrate
uucuuggaauggcagaa

SEQ ID NO: 3441 - RNA, 17 nt, artificial sequence
  misc_feature: oligonucleotide substrate
uuggaauggcagaagau

SEQ ID NO: 3442 - RNA, 17 nt, artificial sequence
  misc_feature: oligonucleotide substrate
ggcagaagaugagaugc

SEQ ID NO: 3443 - RNA, 17 nt, artificial sequence
  misc_feature: oligonucleotide substrate
aagaugagaugccuccc

SEQ ID NO: 3444 - RNA, 17 nt, artificial sequence
  misc_feature: oligonucleotide substrate
gaugagaugccuccccc

SEQ ID NO: 3445 - RNA, 17 nt, artificial sequence
  misc_feature: oligonucleotide substrate
ccccuuugauggucucg

SEQ ID NO: 3446 - RNA, 17 nt, artificial sequence
  misc_feature: oligonucleotide substrate
cuuugauggucucgaug

SEQ ID NO: 3447 - RNA, 17 nt, artificial sequence
  misc_feature: oligonucleotide substrate
uggucucgauggggaug

SEQ ID NO: 3448 - RNA, 17 nt, artificial sequence
  misc_feature: oligonucleotide substrate
cgauggggauggcuuug

SEQ ID NO: 3449 - RNA, 17 nt, artificial sequence
  misc_feature: oligonucleotide substrate
uggggauggcuuugcca

SEQ ID NO: 3450 - RNA, 17 nt, artificial sequence
  misc_feature: oligonucleotide substrate
auggcuuugccauagaa

SEQ ID NO: 3451 - RNA, 17 nt, artificial sequence
  misc_feature: oligonucleotide substrate
gcuuugccauagaaggg

SEQ ID NO: 3452 - RNA, 17 nt, artificial sequence
  misc_feature: oligonucleotide substrate
agaaggggaucucuccg

SEQ ID NO: 3453 - RNA, 17 nt, artificial sequence
  misc_feature: oligonucleotide substrate
ucucuccgguguuggac

SEQ ID NO: 3454 - RNA, 17 nt, artificial sequence
  misc_feature: oligonucleotide substrate
ucuccgguguuggacaa

SEQ ID NO: 3455 - RNA, 17 nt, artificial sequence
  misc_feature: oligonucleotide substrate
gguguuggacaaggcua

SEQ ID NO: 3456 - RNA, 17 nt, artificial sequence
  misc_feature: oligonucleotide substrate
uggacaaggcuaucucc

SEQ ID NO: 3457 - RNA, 17 nt, artificial sequence
  misc_feature: oligonucleotide substrate
acaaggcuaucuccucg

SEQ ID NO: 3458 - RNA, 17 nt, artificial sequence
  misc_feature: oligonucleotide substrate
ucuccucgauguuggga

SEQ ID NO: 3459 - RNA, 17 nt, artificial sequence
  misc_feature: oligonucleotide substrate
uccucgauguugggaug

SEQ ID NO: 3460 - RNA, 17 nt, artificial sequence
  misc_feature: oligonucleotide substrate
auguugggauguggcac

SEQ ID NO: 3461 - RNA, 17 nt, artificial sequence
  misc_feature: oligonucleotide substrate
guugggauguggcacgg

SEQ ID NO: 3462 - RNA, 17 nt, artificial sequence
  misc_feature: oligonucleotide substrate
gggauguggcacgguga

SEQ ID NO: 3463 - RNA, 17 nt, artificial sequence
  misc_feature: oligonucleotide substrate
gauguggcacggugacc

SEQ ID NO: 3464 - RNA, 17 nt, artificial sequence
  misc_feature: oligonucleotide substrate
guggcacggugaccgau

SEQ ID NO: 3465 - RNA, 17 nt, artificial sequence
  misc_feature: oligonucleotide substrate
gcacggugaccgauccc

SEQ ID NO: 3466 - RNA, 17 nt, artificial sequence
  misc_feature: oligonucleotide substrate
ggugaccgaucccggag

SEQ ID NO: 3467 - RNA, 17 nt, artificial sequence
  misc_feature: oligonucleotide substrate
ucccggaggcguagcgg

SEQ ID NO: 3468 - RNA, 17 nt, artificial sequence
  misc_feature: oligonucleotide substrate
ccggaggcguagcggug

SEQ ID NO: 3469 - RNA, 17 nt, artificial sequence
  misc_feature: oligonucleotide substrate
gaggcguagcgguggcg

SEQ ID NO: 3470 - RNA, 17 nt, artificial sequence
  misc_feature: oligonucleotide substrate
gcguagcgguggcgagc

SEQ ID NO: 3471 - RNA, 17 nt, artificial sequence
  misc_feature: oligonucleotide substrate
uagcgguggcgagcacg

SEQ ID NO: 3472 - RNA, 17 nt, artificial sequence
  misc_feature: oligonucleotide substrate
gguggcgagcacgacga

SEQ ID NO: 3473 - RNA, 17 nt, artificial sequence
  misc_feature: oligonucleotide substrate
uggcgagcacgacgagc

SEQ ID NO: 3474 - RNA, 17 nt, artificial sequence
  misc_feature: oligonucleotide substrate
cgagcacgacgagccgc

SEQ ID NO: 3475 - RNA, 17 nt, artificial sequence
  misc_feature: oligonucleotide substrate
cacgacgagccgcgcuc

SEQ ID NO: 3476 - RNA, 17 nt, artificial sequence
  misc_feature: oligonucleotide substrate
gacgagccgcgcuccag

SEQ ID NO: 3477 - RNA, 17 nt, artificial sequence
  misc_feature: oligonucleotide substrate
cgagccgcgcuccagcc

SEQ ID NO: 3478 - RNA, 17 nt, artificial sequence
  misc_feature: oligonucleotide substrate
gcgcuccagccgucucc

SEQ ID NO: 3479 - RNA, 17 nt, artificial sequence
  misc_feature: oligonucleotide substrate
cuccagccgucuccgcu

SEQ ID NO: 3480 - RNA, 17 nt, artificial sequence
  misc_feature: oligonucleotide substrate
ccgucuccgcuuggucc

SEQ ID NO: 3481 - RNA, 17 nt, artificial sequence
  misc_feature: oligonucleotide substrate
uccgcuugguccaggac

SEQ ID NO: 3482 - RNA, 17 nt, artificial sequence
  misc_feature: oligonucleotide substrate
gguccaggacugugccg

SEQ ID NO: 3483 - RNA, 17 nt, artificial sequence
  misc_feature: oligonucleotide substrate
ccaggacugugccgaug

SEQ ID NO: 3484 - RNA, 17 nt, artificial sequence
  misc_feature: oligonucleotide substrate
aggacugugccgaugcc

SEQ ID NO: 3485 - RNA, 17 nt, artificial sequence
  misc_feature: oligonucleotide substrate
cugugccgaugcccaaa

SEQ ID NO: 3486 - RNA, 17 nt, artificial sequence
  misc_feature: oligonucleotide substrate
gugccgaugcccaaaau

SEQ ID NO: 3487 - RNA, 17 nt, artificial sequence
  misc_feature: oligonucleotide substrate
ugcccaaaauggaaguc

SEQ ID NO: 3488 - RNA, 17 nt, artificial sequence
  misc_feature: oligonucleotide substrate
aaauggaagucgaguca

SEQ ID NO: 3489 - RNA, 17 nt, artificial sequence
  misc_feature: oligonucleotide substrate
gaagucgagucaauuga

SEQ ID NO: 3490 - RNA, 17 nt, artificial sequence
  misc_feature: oligonucleotide substrate
ucgagucaauugagugg

SEQ ID NO: 3491 - RNA, 17 nt, artificial sequence
  misc_feature: oligonucleotide substrate
ucaauugaguggcacuc

SEQ ID NO: 3492 - RNA, 17 nt, artificial sequence
  misc_feature: oligonucleotide substrate
auugaguggcacucauc

SEQ ID NO: 3493 - RNA, 17 nt, artificial sequence
  misc_feature: oligonucleotide substrate
ugaguggcacucaucac

SEQ ID NO: 3494 - RNA, 17 nt, artificial sequence
  misc_feature: oligonucleotide substrate
uggcacucaucacacau

SEQ ID NO: 3495 - RNA, 17 nt, artificial sequence
  misc_feature: oligonucleotide substrate
cacucaucacacauuau

SEQ ID NO: 3496 - RNA, 17 nt, artificial sequence
  misc_feature: oligonucleotide substrate
cucaucacacauuauga

SEQ ID NO: 3497 - RNA, 17 nt, artificial sequence
  misc_feature: oligonucleotide substrate
caucacacauuaugaug

SEQ ID NO: 3498 - RNA, 17 nt, artificial sequence
  misc_feature: oligonucleotide substrate
cacacauuaugauguca

SEQ ID NO: 3499 - RNA, 17 nt, artificial sequence
  misc_feature: oligonucleotide substrate
acauuaugaugucauag

SEQ ID NO: 3500 - RNA, 17 nt, artificial sequence
  misc_feature: oligonucleotide substrate
auuaugaugucauaggc

SEQ ID NO: 3501 - RNA, 17 nt, artificial sequence
  misc_feature: oligonucleotide substrate
augaugucauaggcgcc

SEQ ID NO: 3502 - RNA, 17 nt, artificial sequence
  misc_feature: oligonucleotide substrate
ugucauaggcgccccca

SEQ ID NO: 3503 - RNA, 17 nt, artificial sequence
  misc_feature: oligonucleotide substrate
ucauaggcgcccccaga

SEQ ID NO: 3504 - RNA, 17 nt, artificial sequence
  misc_feature: oligonucleotide substrate
cccccagagcaaccacc

SEQ ID NO: 3505 - RNA, 17 nt, artificial sequence
  misc_feature: oligonucleotide substrate
ccagagcaaccaccguc

SEQ ID NO: 3506 - RNA, 17 nt, artificial sequence
  misc_feature: oligonucleotide substrate
gagcaaccaccgucggc

SEQ ID NO: 3507 - RNA, 17 nt, artificial sequence
  misc_feature: oligonucleotide substrate
caaccaccgucggcaag

SEQ ID NO: 3508 - RNA, 17 nt, artificial sequence
  misc_feature: oligonucleotide substrate
caccgucggcaaggaac

SEQ ID NO: 3509 - RNA, 17 nt, artificial sequence
  misc_feature: oligonucleotide substrate
ggcaaggaacuugccau

SEQ ID NO: 3510 - RNA, 17 nt, artificial sequence
  misc_feature: oligonucleotide substrate
aggaacuugccauaggu

SEQ ID NO: 3511 - RNA, 17 nt, artificial sequence
  misc_feature: oligonucleotide substrate
aacuugccauaggugga

SEQ ID NO: 3512 - RNA, 17 nt, artificial sequence
  misc_feature: oligonucleotide substrate
ugccauagguggaguac

SEQ ID NO: 3513 - RNA, 17 nt, artificial sequence
  misc_feature: oligonucleotide substrate
uagguggaguacgugau

SEQ ID NO: 3514 - RNA, 17 nt, artificial sequence
  misc_feature: oligonucleotide substrate
gguggaguacgugaugg

SEQ ID NO: 3515 - RNA, 17 nt, artificial sequence
  misc_feature: oligonucleotide substrate
uggaguacgugaugggg

SEQ ID NO: 3516 - RNA, 17 nt, artificial sequence
  misc_feature: oligonucleotide substrate
aguacgugaugggggcg

SEQ ID NO: 3517 - RNA, 17 nt, artificial sequence
  misc_feature: oligonucleotide substrate
ugaugggggcgcccgug

SEQ ID NO: 3518 - RNA, 17 nt, artificial sequence
  misc_feature: oligonucleotide substrate
augggggcgcccguggu

SEQ ID NO: 3519 - RNA, 17 nt, artificial sequence
  misc_feature: oligonucleotide substrate
gggcgcccguggugaug

SEQ ID NO: 3520 - RNA, 17 nt, artificial sequence
  misc_feature: oligonucleotide substrate
cgcccguggugaugguc

SEQ ID NO: 3521 - RNA, 17 nt, artificial sequence
  misc_feature: oligonucleotide substrate
ccguggugaugguccuu

SEQ ID NO: 3522 - RNA, 17 nt, artificial sequence
  misc_feature: oligonucleotide substrate
uggugaugguccuuacc

SEQ ID NO: 3523 - RNA, 17 nt, artificial sequence
  misc_feature: oligonucleotide substrate
ugguccuuaccccaguu

SEQ ID NO: 3524 - RNA, 17 nt, artificial sequence
  misc_feature: oligonucleotide substrate
uuaccccaguucugaug

SEQ ID NO: 3525 - RNA, 17 nt, artificial sequence
  misc_feature: oligonucleotide substrate
caguucugauguuagga

SEQ ID NO: 3526 - RNA, 17 nt, artificial sequence
  misc_feature: oligonucleotide substrate
guucugauguuaggauc

SEQ ID NO: 3527 - RNA, 17 nt, artificial sequence
  misc_feature: oligonucleotide substrate
auguuaggaucgacacc

SEQ ID NO: 3528 - RNA, 17 nt, artificial sequence
  misc_feature: oligonucleotide substrate
uaggaucgacaccgugu

SEQ ID NO: 3529 - RNA, 17 nt, artificial sequence
  misc_feature: oligonucleotide substrate
ggaucgacaccgugugc

SEQ ID NO: 3530 - RNA, 17 nt, artificial sequence
  misc_feature: oligonucleotide substrate
ucgacaccgugugccuu

SEQ ID NO: 3531 - RNA, 17 nt, artificial sequence
  misc_feature: oligonucleotide substrate
gacaccgugugccuuag

SEQ ID NO: 3532 - RNA, 17 nt, artificial sequence
  misc_feature: oligonucleotide substrate
caccgugugccuuagac

SEQ ID NO: 3533 - RNA, 17 nt, artificial sequence
  misc_feature: oligonucleotide substrate
ugccuuagacauauacg

SEQ ID NO: 3534 - RNA, 17 nt, artificial sequence
  misc_feature: oligonucleotide substrate
ccuuagacauauacgcc

SEQ ID NO: 3535 - RNA, 17 nt, artificial sequence
  misc_feature: oligonucleotide substrate
uuagacauauacgcccc

SEQ ID NO: 3536 - RNA, 17 nt, artificial sequence
  misc_feature: oligonucleotide substrate
agacauauacgccccaa

SEQ ID NO: 3537 - RNA, 17 nt, artificial sequence
  misc_feature: oligonucleotide substrate
acauauacgccccaaac

SEQ ID NO: 3538 - RNA, 17 nt, artificial sequence
  misc_feature: oligonucleotide substrate
cgccccaaacccuaagg

SEQ ID NO: 3539 - RNA, 17 nt, artificial sequence
  misc_feature: oligonucleotide substrate
acccuaagguggcggua

SEQ ID NO: 3540 - RNA, 17 nt, artificial sequence
  misc_feature: oligonucleotide substrate
cuaagguggcgguaacg

SEQ ID NO: 3541 - RNA, 17 nt, artificial sequence
  misc_feature: oligonucleotide substrate
agguggcgguaacggac

SEQ ID NO: 3542 - RNA, 17 nt, artificial sequence
  misc_feature: oligonucleotide substrate
uggcgguaacggacgga

SEQ ID NO: 3543 - RNA, 17 nt, artificial sequence
  misc_feature: oligonucleotide substrate
gguaacggacggauuua

SEQ ID NO: 3544 - RNA, 17 nt, artificial sequence
  misc_feature: oligonucleotide substrate
acggacggauuuaggac

SEQ ID NO: 3545 - RNA, 17 nt, artificial sequence
  misc_feature: oligonucleotide substrate
gauuuaggacgagcacu

SEQ ID NO: 3546 - RNA, 17 nt, artificial sequence
  misc_feature: oligonucleotide substrate
uaggacgagcacuuugu

SEQ ID NO: 3547 - RNA, 17 nt, artificial sequence
  misc_feature: oligonucleotide substrate
ggacgagcacuuuguac

SEQ ID NO: 3548 - RNA, 17 nt, artificial sequence
  misc_feature: oligonucleotide substrate
agcacuuuguacccuug

SEQ ID NO: 3549 - RNA, 17 nt, artificial sequence
  misc_feature: oligonucleotide substrate
cacuuuguacccuuggg

SEQ ID NO: 3550 - RNA, 17 nt, artificial sequence
  misc_feature: oligonucleotide substrate
acccuugggcugcauau

SEQ ID NO: 3551 - RNA, 17 nt, artificial sequence
  misc_feature: oligonucleotide substrate
cuugggcugcauaugca

SEQ ID NO: 3552 - RNA, 17 nt, artificial sequence
  misc_feature: oligonucleotide substrate
ugggcugcauaugcagc

SEQ ID NO: 3553 - RNA, 17 nt, artificial sequence
  misc_feature: oligonucleotide substrate
ggcugcauaugcagccg

SEQ ID NO: 3554 - RNA, 17 nt, artificial sequence
  misc_feature: oligonucleotide substrate
cugcauaugcagccggu

SEQ ID NO: 3555 - RNA, 17 nt, artificial sequence
  misc_feature: oligonucleotide substrate
cauaugcagccgguacc

SEQ ID NO: 3556 - RNA, 17 nt, artificial sequence
  misc_feature: oligonucleotide substrate
ugcagccgguaccuuag

SEQ ID NO: 3557 - RNA, 17 nt, artificial sequence
  misc_feature: oligonucleotide substrate
cagccgguaccuuagug

SEQ ID NO: 3558 - RNA, 17 nt, artificial sequence
  misc_feature: oligonucleotide substrate
guaccuuagugcucuug

SEQ ID NO: 3559 - RNA, 17 nt, artificial sequence
  misc_feature: oligonucleotide substrate
accuuagugcucuugcc

SEQ ID NO: 3560 - RNA, 17 nt, artificial sequence
  misc_feature: oligonucleotide substrate
gugcucuugccgcugcc

SEQ ID NO: 3561 - RNA, 17 nt, artificial sequence
  misc_feature: oligonucleotide substrate
cucuugccgcugccagu

SEQ ID NO: 3562 - RNA, 17 nt, artificial sequence
  misc_feature: oligonucleotide substrate
uugccgcugccaguggg

SEQ ID NO: 3563 - RNA, 17 nt, artificial sequence
  misc_feature: oligonucleotide substrate
cgcugccagugggagcg

SEQ ID NO: 3564 - RNA, 17 nt, artificial sequence
  misc_feature: oligonucleotide substrate
cagugggagcguguagg

SEQ ID NO: 3565 - RNA, 17 nt, artificial sequence
  misc_feature: oligonucleotide substrate
gugggagcguguaggug

SEQ ID NO: 3566 - RNA, 17 nt, artificial sequence
  misc_feature: oligonucleotide substrate
gggagcguguagguggg

SEQ ID NO: 3567 - RNA, 17 nt, artificial sequence
  misc_feature: oligonucleotide substrate
gcguguaggugggccac

SEQ ID NO: 3568 - RNA, 17 nt, artificial sequence
  misc_feature: oligonucleotide substrate
guaggugggccacuugg

SEQ ID NO: 3569 - RNA, 17 nt, artificial sequence
  misc_feature: oligonucleotide substrate
ggugggccacuuggaau

SEQ ID NO: 3570 - RNA, 17 nt, artificial sequence
  misc_feature: oligonucleotide substrate
cacuuggaaugucugcg

SEQ ID NO: 3571 - RNA, 17 nt, artificial sequence
  misc_feature: oligonucleotide substrate
cuuggaaugucugcggu

SEQ ID NO: 3572 - RNA, 17 nt, artificial sequence
  misc_feature: oligonucleotide substrate
gaaugucugcgguacgg

SEQ ID NO: 3573 - RNA, 17 nt, artificial sequence
  misc_feature: oligonucleotide substrate
ugucugcgguacggcug

SEQ ID NO: 3574 - RNA, 17 nt, artificial sequence
  misc_feature: oligonucleotide substrate
ucugcgguacggcuggg

SEQ ID NO: 3575 - RNA, 17 nt, artificial sequence
  misc_feature: oligonucleotide substrate
gcgguacggcugggggg

SEQ ID NO: 3576 - RNA, 17 nt, artificial sequence
  misc_feature: oligonucleotide substrate
ugggggggacgaguugu

SEQ ID NO: 3577 - RNA, 17 nt, artificial sequence
  misc_feature: oligonucleotide substrate
ggggacgaguuguccgu

SEQ ID NO: 3578 - RNA, 17 nt, artificial sequence
  misc_feature: oligonucleotide substrate
gacgaguuguccgugaa

SEQ ID NO: 3579 - RNA, 17 nt, artificial sequence
  misc_feature: oligonucleotide substrate
aguuguccgugaagacc

SEQ ID NO: 3580 - RNA, 17 nt, artificial sequence
  misc_feature: oligonucleotide substrate
ccgugaagaccggggac

SEQ ID NO: 3581 - RNA, 17 nt, artificial sequence
  misc_feature: oligonucleotide substrate
gaccggggaccgcaugg

SEQ ID NO: 3582 - RNA, 17 nt, artificial sequence
  misc_feature: oligonucleotide substrate
cggggaccgcaugguag

SEQ ID NO: 3583 - RNA, 17 nt, artificial sequence
  misc_feature: oligonucleotide substrate
gggaccgcaugguaguu

SEQ ID NO: 3584 - RNA, 17 nt, artificial sequence
  misc_feature: oligonucleotide substrate
accgcaugguaguuucc

SEQ ID NO: 3585 - RNA, 17 nt, artificial sequence
  misc_feature: oligonucleotide substrate
gcaugguaguuuccaua

SEQ ID NO: 3586 - RNA, 17 nt, artificial sequence
  misc_feature: oligonucleotide substrate
uaguuuccauagacuca

SEQ ID NO: 3587 - RNA, 17 nt, artificial sequence
  misc_feature: oligonucleotide substrate
uuccauagacucaacgg

SEQ ID NO: 3588 - RNA, 17 nt, artificial sequence
  misc_feature: oligonucleotide substrate
uagacucaacggguaca

SEQ ID NO: 3589 - RNA, 17 nt, artificial sequence
  misc_feature: oligonucleotide substrate
cucaacggguacaaagu

SEQ ID NO: 3590 - RNA, 17 nt, artificial sequence
  misc_feature: oligonucleotide substrate
caacggguacaaagucc

SEQ ID NO: 3591 - RNA, 17 nt, artificial sequence
  misc_feature: oligonucleotide substrate
gguacaaaguccaccgc

SEQ ID NO: 3592 - RNA, 17 nt, artificial sequence
  misc_feature: oligonucleotide substrate
caaaguccaccgccuuc

SEQ ID NO: 3593 - RNA, 17 nt, artificial sequence
  misc_feature: oligonucleotide substrate
aguccaccgccuucgca

SEQ ID NO: 3594 - RNA, 17 nt, artificial sequence
  misc_feature: oligonucleotide substrate
ccgccuucgcaaccccc

SEQ ID NO: 3595 - RNA, 17 nt, artificial sequence
  misc_feature: oligonucleotide substrate
ccuucgcaaccccccgg

SEQ ID NO: 3596 - RNA, 17 nt, artificial sequence
  misc_feature: oligonucleotide substrate
ccccccgggugcacaca

SEQ ID NO: 3597 - RNA, 17 nt, artificial sequence
  misc_feature: oligonucleotide substrate
ccccgggugcacacagc

SEQ ID NO: 3598 - RNA, 17 nt, artificial sequence
  misc_feature: oligonucleotide substrate
ccgggugcacacagcag

SEQ ID NO: 3599 - RNA, 17 nt, artificial sequence
  misc_feature: oligonucleotide substrate
gggugcacacagcagcc

SEQ ID NO: 3600 - RNA, 17 nt, artificial sequence
  misc_feature: oligonucleotide substrate
ugcacacagcagcccgg

SEQ ID NO: 3601 - RNA, 17 nt, artificial sequence
  misc_feature: oligonucleotide substrate
acacagcagcccggaag

SEQ ID NO: 3602 - RNA, 17 nt, artificial sequence
  misc_feature: oligonucleotide substrate
cccggaagaugcccaca

SEQ ID NO: 3603 - RNA, 17 nt, artificial sequence
  misc_feature: oligonucleotide substrate
cggaagaugcccacaac

SEQ ID NO: 3604 - RNA, 17 nt, artificial sequence
  misc_feature: oligonucleotide substrate
agaugcccacaacgugc

SEQ ID NO: 3605 - RNA, 17 nt, artificial sequence
  misc_feature: oligonucleotide substrate
ugcccacaacgugcccc

SEQ ID NO: 3606 - RNA, 17 nt, artificial sequence
  misc_feature: oligonucleotide substrate
cccacaacgugccccga

SEQ ID NO: 3607 - RNA, 17 nt, artificial sequence
  misc_feature: oligonucleotide substrate
cacaacgugccccgaag

SEQ ID NO: 3608 - RNA, 17 nt, artificial sequence
  misc_feature: oligonucleotide substrate
cccgaagggcagagcag

SEQ ID NO: 3609 - RNA, 17 nt, artificial sequence
  misc_feature: oligonucleotide substrate
agggcagagcaguggac

SEQ ID NO: 3610 - RNA, 17 nt, artificial sequence
  misc_feature: oligonucleotide substrate
gcagagcaguggaccgc

SEQ ID NO: 3611 - RNA, 17 nt, artificial sequence
  misc_feature: oligonucleotide substrate
agcaguggaccgcccga

SEQ ID NO: 3612 - RNA, 17 nt, artificial sequence
  misc_feature: oligonucleotide substrate
aguggaccgcccgagga

SEQ ID NO: 3613 - RNA, 17 nt, artificial sequence
  misc_feature: oligonucleotide substrate
cccgaggagcccuucaa

SEQ ID NO: 3614 - RNA, 17 nt, artificial sequence
  misc_feature: oligonucleotide substrate
cccuucaaguaggagau

SEQ ID NO: 3615 - RNA, 17 nt, artificial sequence
  misc_feature: oligonucleotide substrate
aguaggagaugggccug

SEQ ID NO: 3616 - RNA, 17 nt, artificial sequence
  misc_feature: oligonucleotide substrate
ggagaugggccuggggg

SEQ ID NO: 3617 - RNA, 17 nt, artificial sequence
  misc_feature: oligonucleotide substrate
ccugggggauaguaagc

SEQ ID NO: 3618 - RNA, 17 nt, artificial sequence
  misc_feature: oligonucleotide substrate
gggggauaguaagcucc

SEQ ID NO: 3619 - RNA, 17 nt, artificial sequence
  misc_feature: oligonucleotide substrate
gauaguaagcucccccu

SEQ ID NO: 3620 - RNA, 17 nt, artificial sequence
  misc_feature: oligonucleotide substrate
cucccccugcugucacc

SEQ ID NO: 3621 - RNA, 17 nt, artificial sequence
  misc_feature: oligonucleotide substrate
ccccugcugucaccccg

SEQ ID NO: 3622 - RNA, 17 nt, artificial sequence
  misc_feature: oligonucleotide substrate
cugcugucaccccgccg

SEQ ID NO: 3623 - RNA, 17 nt, artificial sequence
  misc_feature: oligonucleotide substrate
gucaccccgccggcgca

SEQ ID NO: 3624 - RNA, 17 nt, artificial sequence
  misc_feature: oligonucleotide substrate
ccccgccggcgcaccgg

SEQ ID NO: 3625 - RNA, 17 nt, artificial sequence
  misc_feature: oligonucleotide substrate
ccgccggcgcaccggaa

SEQ ID NO: 3626 - RNA, 17 nt, artificial sequence
  misc_feature: oligonucleotide substrate
gccggcgcaccggaaug

SEQ ID NO: 3627 - RNA, 17 nt, artificial sequence
  misc_feature: oligonucleotide substrate
gcaccggaaugacauca

SEQ ID NO: 3628 - RNA, 17 nt, artificial sequence
  misc_feature: oligonucleotide substrate
ccggaaugacaucagcg

SEQ ID NO: 3629 - RNA, 17 nt, artificial sequence
  misc_feature: oligonucleotide substrate
ggaaugacaucagcgug

SEQ ID NO: 3630 - RNA, 17 nt, artificial sequence
  misc_feature: oligonucleotide substrate
ugacaucagcgugucuc

SEQ ID NO: 3631 - RNA, 17 nt, artificial sequence
  misc_feature: oligonucleotide substrate
acaucagcgugucucgu

SEQ ID NO: 3632 - RNA, 17 nt, artificial sequence
  misc_feature: oligonucleotide substrate
aucagcgugucucguga

SEQ ID NO: 3633 - RNA, 17 nt, artificial sequence
  misc_feature: oligonucleotide substrate
cgugucucgugaccaag

SEQ ID NO: 3634 - RNA, 17 nt, artificial sequence
  misc_feature: oligonucleotide substrate
gucucgugaccaaguaa

SEQ ID NO: 3635 - RNA, 17 nt, artificial sequence
  misc_feature: oligonucleotide substrate
gugaccaaguaaagguc

SEQ ID NO: 3636 - RNA, 17 nt, artificial sequence
  misc_feature: oligonucleotide substrate
aaguaaagguccgagcc

SEQ ID NO: 3637 - RNA, 17 nt, artificial sequence
  misc_feature: oligonucleotide substrate
agguccgagccgccgca

SEQ ID NO: 3638 - RNA, 17 nt, artificial sequence
  misc_feature: oligonucleotide substrate
uccgagccgccgcaggu

SEQ ID NO: 3639 - RNA, 17 nt, artificial sequence
  misc_feature: oligonucleotide substrate
gagccgccgcaggugca

SEQ ID NO: 3640 - RNA, 17 nt, artificial sequence
  misc_feature: oligonucleotide substrate
cgccgcaggugcauggu

SEQ ID NO: 3641 - RNA, 17 nt, artificial sequence
  misc_feature: oligonucleotide substrate
ccgcaggugcauggugu

SEQ ID NO: 3642 - RNA, 17 nt, artificial sequence
  misc_feature: oligonucleotide substrate
gcaggugcaugguguca

SEQ ID NO: 3643 - RNA, 17 nt, artificial sequence
  misc_feature: oligonucleotide substrate
ggugcauggugucaagg

SEQ ID NO: 3644 - RNA, 17 nt, artificial sequence
  misc_feature: oligonucleotide substrate
ugcauggugucaaggac

SEQ ID NO: 3645 - RNA, 17 nt, artificial sequence
  misc_feature: oligonucleotide substrate
ugucaaggaccgcgcuc

SEQ ID NO: 3646 - RNA, 17 nt, artificial sequence
  misc_feature: oligonucleotide substrate
caaggaccgcgcuccgg

SEQ ID NO: 3647 - RNA, 17 nt, artificial sequence
  misc_feature: oligonucleotide substrate
aggaccgcgcuccgggg

SEQ ID NO: 3648 - RNA, 17 nt, artificial sequence
  misc_feature: oligonucleotide substrate
uccggggggcgccggcc

SEQ ID NO: 3649 - RNA, 17 nt, artificial sequence
  misc_feature: oligonucleotide substrate
cggggggcgccggccau

SEQ ID NO: 3650 - RNA, 17 nt, artificial sequence
  misc_feature: oligonucleotide substrate
gggcgccggccauccga

SEQ ID NO: 3651 - RNA, 17 nt, artificial sequence
  misc_feature: oligonucleotide substrate
cgccggccauccgacga

SEQ ID NO: 3652 - RNA, 17 nt, artificial sequence
  misc_feature: oligonucleotide substrate
gccauccgacgaggucc

SEQ ID NO: 3653 - RNA, 17 nt, artificial sequence
  misc_feature: oligonucleotide substrate
ccgacgagguccugguc

SEQ ID NO: 3654 - RNA, 17 nt, artificial sequence
  misc_feature: oligonucleotide substrate
agguccuggucuacauu

SEQ ID NO: 3655 - RNA, 17 nt, artificial sequence
  misc_feature: oligonucleotide substrate
ccuggucuacauuggug

SEQ ID NO: 3656 - RNA, 17 nt, artificial sequence
  misc_feature: oligonucleotide substrate
uggucuacauuggugua

SEQ ID NO: 3657 - RNA, 17 nt, artificial sequence
  misc_feature: oligonucleotide substrate
cuacauugguguacauu

SEQ ID NO: 3658 - RNA, 17 nt, artificial sequence
  misc_feature: oligonucleotide substrate
acauugguguacauuug

SEQ ID NO: 3659 - RNA, 17 nt, artificial sequence
  misc_feature: oligonucleotide substrate
auugguguacauuuggg

SEQ ID NO: 3660 - RNA, 17 nt, artificial sequence
  misc_feature: oligonucleotide substrate
ugguguacauuugggug

SEQ ID NO: 3661 - RNA, 17 nt, artificial sequence
  misc_feature: oligonucleotide substrate
acauuugggugauugga

SEQ ID NO: 3662 - RNA, 17 nt, artificial sequence
  misc_feature: oligonucleotide substrate
uuugggugauuggaccc

SEQ ID NO: 3663 - RNA, 17 nt, artificial sequence
  misc_feature: oligonucleotide substrate
gugauuggacccuuugg

SEQ ID NO: 3664 - RNA, 17 nt, artificial sequence
  misc_feature: oligonucleotide substrate
cccuuugggccggcuag

SEQ ID NO: 3665 - RNA, 17 nt, artificial sequence
  misc_feature: oligonucleotide substrate
uugggccggcuaggguc

SEQ ID NO: 3666 - RNA, 17 nt, artificial sequence
  misc_feature: oligonucleotide substrate
cggcuagggucuuugag

SEQ ID NO: 3667 - RNA, 17 nt, artificial sequence
  misc_feature: oligonucleotide substrate
gucuuugagccggcgcc

SEQ ID NO: 3668 - RNA, 17 nt, artificial sequence
  misc_feature: oligonucleotide substrate
uugagccggcgccgugg

SEQ ID NO: 3669 - RNA, 17 nt, artificial sequence
  misc_feature: oligonucleotide substrate
gagccggcgccguggua

SEQ ID NO: 3670 - RNA, 17 nt, artificial sequence
  misc_feature: oligonucleotide substrate
ccggcgccgugguagac

SEQ ID NO: 3671 - RNA, 17 nt, artificial sequence
  misc_feature: oligonucleotide substrate
gcgccgugguagacagu

SEQ ID NO: 3672 - RNA, 17 nt, artificial sequence
  misc_feature: oligonucleotide substrate
cgugguagacaguccag

SEQ ID NO: 3673 - RNA, 17 nt, artificial sequence
  misc_feature: oligonucleotide substrate
gguagacaguccagcac

SEQ ID NO: 3674 - RNA, 17 nt, artificial sequence
  misc_feature: oligonucleotide substrate
acaguccagcacacgcc

SEQ ID NO: 3675 - RNA, 17 nt, artificial sequence
  misc_feature: oligonucleotide substrate
aguccagcacacgccgu

SEQ ID NO: 3676 - RNA, 17 nt, artificial sequence
  misc_feature: oligonucleotide substrate
uccagcacacgccguug

SEQ ID NO: 3677 - RNA, 17 nt, artificial sequence
  misc_feature: oligonucleotide substrate
cagcacacgccguugac

SEQ ID NO: 3678 - RNA, 17 nt, artificial sequence
  misc_feature: oligonucleotide substrate
cacacgccguugacgca

SEQ ID NO: 3679 - RNA, 17 nt, artificial sequence
  misc_feature: oligonucleotide substrate
cgccguugacgcagguc

SEQ ID NO: 3680 - RNA, 17 nt, artificial sequence
  misc_feature: oligonucleotide substrate
ccguugacgcaggucgc

SEQ ID NO: 3681 - RNA, 17 nt, artificial sequence
  misc_feature: oligonucleotide substrate
ugacgcaggucgcuagg

SEQ ID NO: 3682 - RNA, 17 nt, artificial sequence
  misc_feature: oligonucleotide substrate
cgcaggucgcuaggaaa

SEQ ID NO: 3683 - RNA, 17 nt, artificial sequence
  misc_feature: oligonucleotide substrate
uaggaaagacugcgucg

SEQ ID NO: 3684 - RNA, 17 nt, artificial sequence
  misc_feature: oligonucleotide substrate
gaaagacugcgucgcgg

SEQ ID NO: 3685 - RNA, 17 nt, artificial sequence
  misc_feature: oligonucleotide substrate
aagacugcgucgcggug

SEQ ID NO: 3686 - RNA, 17 nt, artificial sequence
  misc_feature: oligonucleotide substrate
acugcgucgcgguggaa

SEQ ID NO: 3687 - RNA, 17 nt, artificial sequence
  misc_feature: oligonucleotide substrate
gcgucgcgguggaaacc

SEQ ID NO: 3688 - RNA, 17 nt, artificial sequence
  misc_feature: oligonucleotide substrate
cgguggaaaccacuuga

SEQ ID NO: 3689 - RNA, 17 nt, artificial sequence
  misc_feature: oligonucleotide substrate
uggaaaccacuugaacu

SEQ ID NO: 3690 - RNA, 17 nt, artificial sequence
  misc_feature: oligonucleotide substrate
ccacuugaacuuccccc

SEQ ID NO: 3691 - RNA, 17 nt, artificial sequence
  misc_feature: oligonucleotide substrate
cccccucgacuugguuc

SEQ ID NO: 3692 - RNA, 17 nt, artificial sequence
  misc_feature: oligonucleotide substrate
ucgacuugguucuuguc

SEQ ID NO: 3693 - RNA, 17 nt, artificial sequence
  misc_feature: oligonucleotide substrate
ugguucuugucccggcc

SEQ ID NO: 3694 - RNA, 17 nt, artificial sequence
  misc_feature: oligonucleotide substrate
uugucccggcccgugag

SEQ ID NO: 3695 - RNA, 17 nt, artificial sequence
  misc_feature: oligonucleotide substrate
cccggcccgugaggcug

SEQ ID NO: 3696 - RNA, 17 nt, artificial sequence
  misc_feature: oligonucleotide substrate
cccgugaggcuggugau

SEQ ID NO: 3697 - RNA, 17 nt, artificial sequence
  misc_feature: oligonucleotide substrate
ugaggcuggugauaaug

SEQ ID NO: 3698 - RNA, 17 nt, artificial sequence
  misc_feature: oligonucleotide substrate
ggcuggugauaaugcag

SEQ ID NO: 3699 - RNA, 17 nt, artificial sequence
  misc_feature: oligonucleotide substrate
uggugauaaugcagcca

SEQ ID NO: 3700 - RNA, 17 nt, artificial sequence
  misc_feature: oligonucleotide substrate
gugauaaugcagccaaa

SEQ ID NO: 3701 - RNA, 17 nt, artificial sequence
  misc_feature: oligonucleotide substrate
auaaugcagccaaacag

SEQ ID NO: 3702 - RNA, 17 nt, artificial sequence
  misc_feature: oligonucleotide substrate
gcagccaaacaggcccc

SEQ ID NO: 3703 - RNA, 17 nt, artificial sequence
  misc_feature: oligonucleotide substrate
ccaaacaggccccgcgu

SEQ ID NO: 3704 - RNA, 17 nt, artificial sequence
  misc_feature: oligonucleotide substrate
caggccccgcgucuguu

SEQ ID NO: 3705 - RNA, 17 nt, artificial sequence
  misc_feature: oligonucleotide substrate
ggccccgcgucuguugg

SEQ ID NO: 3706 - RNA, 17 nt, artificial sequence
  misc_feature: oligonucleotide substrate
ccgcgucuguugggagu

SEQ ID NO: 3707 - RNA, 17 nt, artificial sequence
  misc_feature: oligonucleotide substrate
uguugggaguaggccgu

SEQ ID NO: 3708 - RNA, 17 nt, artificial sequence
  misc_feature: oligonucleotide substrate
gggaguaggccguaaug

SEQ ID NO: 3709 - RNA, 17 nt, artificial sequence
  misc_feature: oligonucleotide substrate
aguaggccguaaugggc

SEQ ID NO: 3710 - RNA, 17 nt, artificial sequence
  misc_feature: oligonucleotide substrate
aggccguaaugggcgcg

SEQ ID NO: 3711 - RNA, 17 nt, artificial sequence
  misc_feature: oligonucleotide substrate
cguaaugggcgcgagga

SEQ ID NO: 3712 - RNA, 17 nt, artificial sequence
  misc_feature: oligonucleotide substrate
uaaugggcgcgaggagu

SEQ ID NO: 3713 - RNA, 17 nt, artificial sequence
  misc_feature: oligonucleotide substrate
cgcgaggagucgccacc

SEQ ID NO: 3714 - RNA, 17 nt, artificial sequence
  misc_feature: oligonucleotide substrate
gaggagucgccaccccu

SEQ ID NO: 3715 - RNA, 17 nt, artificial sequence
  misc_feature: oligonucleotide substrate
gagucgccaccccugcc

SEQ ID NO: 3716 - RNA, 17 nt, artificial sequence
  misc_feature: oligonucleotide substrate
ccaccccugccccucaa

SEQ ID NO: 3717 - RNA, 17 nt, artificial sequence
  misc_feature: oligonucleotide substrate
cccucaagacugucggc

SEQ ID NO: 3718 - RNA, 17 nt, artificial sequence
  misc_feature: oligonucleotide substrate
ucaagacugucggcugg

SEQ ID NO: 3719 - RNA, 17 nt, artificial sequence
  misc_feature: oligonucleotide substrate
gacugucggcugguccu

SEQ ID NO: 3720 - RNA, 17 nt, artificial sequence
  misc_feature: oligonucleotide substrate
gucggcugguccuagga

SEQ ID NO: 3721 - RNA, 17 nt, artificial sequence
  misc_feature: oligonucleotide substrate
uccuaggaguaucuccc

SEQ ID NO: 3722 - RNA, 17 nt, artificial sequence
  misc_feature: oligonucleotide substrate
cuaggaguaucucccuc

SEQ ID NO: 3723 - RNA, 17 nt, artificial sequence
  misc_feature: oligonucleotide substrate
cccuucgggcggagaca

SEQ ID NO: 3724 - RNA, 17 nt, artificial sequence
  misc_feature: oligonucleotide substrate
gggcggagacagguaga

SEQ ID NO: 3725 - RNA, 17 nt, artificial sequence
  misc_feature: oligonucleotide substrate
ggagacagguagaccca

SEQ ID NO: 3726 - RNA, 17 nt, artificial sequence
  misc_feature: oligonucleotide substrate
acagguagacccauaau

SEQ ID NO: 3727 - RNA, 17 nt, artificial sequence
  misc_feature: oligonucleotide substrate
guagacccauaaugaug

SEQ ID NO: 3728 - RNA, 17 nt, artificial sequence
  misc_feature: oligonucleotide substrate
gacccauaaugaugucc

SEQ ID NO: 3729 - RNA, 17 nt, artificial sequence
  misc_feature: oligonucleotide substrate
ccauaaugaugucccca

SEQ ID NO: 3730 - RNA, 17 nt, artificial sequence
  misc_feature: oligonucleotide substrate
auaaugauguccccaca

SEQ ID NO: 3731 - RNA, 17 nt, artificial sequence
  misc_feature: oligonucleotide substrate
auguccccacacgccgc

SEQ ID NO: 3732 - RNA, 17 nt, artificial sequence
  misc_feature: oligonucleotide substrate
guccccacacgccgcgg

SEQ ID NO: 3733 - RNA, 17 nt, artificial sequence
  misc_feature: oligonucleotide substrate
ccccacacgccgcggug

SEQ ID NO: 3734 - RNA, 17 nt, artificial sequence
  misc_feature: oligonucleotide substrate
cacacgccgcggugucu

SEQ ID NO: 3735 - RNA, 17 nt, artificial sequence
  misc_feature: oligonucleotide substrate
acgccgcggugucuccc

SEQ ID NO: 3736 - RNA, 17 nt, artificial sequence
  misc_feature: oligonucleotide substrate
gccgcggugucuccccc

SEQ ID NO: 3737 - RNA, 17 nt, artificial sequence
  misc_feature: oligonucleotide substrate
ccccccaggugaugauc

SEQ ID NO: 3738 - RNA, 17 nt, artificial sequence
  misc_feature: oligonucleotide substrate
cccaggugaugaucuug

SEQ ID NO: 3739 - RNA, 17 nt, artificial sequence
  misc_feature: oligonucleotide substrate
aggugaugaucuugauu

SEQ ID NO: 3740 - RNA, 17 nt, artificial sequence
  misc_feature: oligonucleotide substrate
ugaucuugauuuccaug

SEQ ID NO: 3741 - RNA, 17 nt, artificial sequence
  misc_feature: oligonucleotide substrate
ugauuuccaugucggag

SEQ ID NO: 3742 - RNA, 17 nt, artificial sequence
  misc_feature: oligonucleotide substrate
auuuccaugucggagaa

SEQ ID NO: 3743 - RNA, 17 nt, artificial sequence
  misc_feature: oligonucleotide substrate
cggagaagacgacgggc

SEQ ID NO: 3744 - RNA, 17 nt, artificial sequence
  misc_feature: oligonucleotide substrate
agaagacgacgggcucg

SEQ ID NO: 3745 - RNA, 17 nt, artificial sequence
  misc_feature: oligonucleotide substrate
gacgacgggcucgaccg

SEQ ID NO: 3746 - RNA, 17 nt, artificial sequence
  misc_feature: oligonucleotide substrate
cgggcucgaccgcuacc

SEQ ID NO: 3747 - RNA, 17 nt, artificial sequence
  misc_feature: oligonucleotide substrate
gcucgaccgcuaccgcc

SEQ ID NO: 3748 - RNA, 17 nt, artificial sequence
  misc_feature: oligonucleotide substrate
cgaccgcuaccgccagg

SEQ ID NO: 3749 - RNA, 17 nt, artificial sequence
  misc_feature: oligonucleotide substrate
ccgcuaccgccaggucu

SEQ ID NO: 3750 - RNA, 17 nt, artificial sequence
  misc_feature: oligonucleotide substrate
accgccaggucucguag

SEQ ID NO: 3751 - RNA, 17 nt, artificial sequence
  misc_feature: oligonucleotide substrate
caggucucguagaccug

SEQ ID NO: 3752 - RNA, 17 nt, artificial sequence
  misc_feature: oligonucleotide substrate
ucucguagaccugugug

SEQ ID NO: 3753 - RNA, 17 nt, artificial sequence
  misc_feature: oligonucleotide substrate
guagaccugugugggcc

SEQ ID NO: 3754 - RNA, 17 nt, artificial sequence
  misc_feature: oligonucleotide substrate
agaccugugugggccca

SEQ ID NO: 3755 - RNA, 17 nt, artificial sequence
  misc_feature: oligonucleotide substrate
cugugugggcccagucc

SEQ ID NO: 3756 - RNA, 17 nt, artificial sequence
  misc_feature: oligonucleotide substrate
ugggcccaguccugcag

SEQ ID NO: 3757 - RNA, 17 nt, artificial sequence
  misc_feature: oligonucleotide substrate
ccaguccugcaguggag

SEQ ID NO: 3758 - RNA, 17 nt, artificial sequence
  misc_feature: oligonucleotide substrate
guccugcaguggaguga

SEQ ID NO: 3759 - RNA, 17 nt, artificial sequence
  misc_feature: oligonucleotide substrate
gcaguggagugaggugg

SEQ ID NO: 3760 - RNA, 17 nt, artificial sequence
  misc_feature: oligonucleotide substrate
ggagugagguggucaua

SEQ ID NO: 3761 - RNA, 17 nt, artificial sequence
  misc_feature: oligonucleotide substrate
gugagguggucauagac

SEQ ID NO: 3762 - RNA, 17 nt, artificial sequence
  misc_feature: oligonucleotide substrate
agguggucauagacgga

SEQ ID NO: 3763 - RNA, 17 nt, artificial sequence
  misc_feature: oligonucleotide substrate
ggucauagacggacgua

SEQ ID NO: 3764 - RNA, 17 nt, artificial sequence
  misc_feature: oligonucleotide substrate
auagacggacguaccuu

SEQ ID NO: 3765 - RNA, 17 nt, artificial sequence
  misc_feature: oligonucleotide substrate
agacggacguaccuuuc

SEQ ID NO: 3766 - RNA, 17 nt, artificial sequence
  misc_feature: oligonucleotide substrate
acggacguaccuuucaa

SEQ ID NO: 3767 - RNA, 17 nt, artificial sequence
  misc_feature: oligonucleotide substrate
accuuucaauucggcca

SEQ ID NO: 3768 - RNA, 17 nt, artificial sequence
  misc_feature: oligonucleotide substrate
ucaauucggccaacuuc

SEQ ID NO: 3769 - RNA, 17 nt, artificial sequence
  misc_feature: oligonucleotide substrate
uucggccaacuucauga

SEQ ID NO: 3770 - RNA, 17 nt, artificial sequence
  misc_feature: oligonucleotide substrate
ccaacuucaugaaggcc

SEQ ID NO: 3771 - RNA, 17 nt, artificial sequence
  misc_feature: oligonucleotide substrate
ucaugaaggccauuugg

SEQ ID NO: 3772 - RNA, 17 nt, artificial sequence
  misc_feature: oligonucleotide substrate
ugaaggccauuuggaca

SEQ ID NO: 3773 - RNA, 17 nt, artificial sequence
  misc_feature: oligonucleotide substrate
ccauuuggacauauugc

SEQ ID NO: 3774 - RNA, 17 nt, artificial sequence
  misc_feature: oligonucleotide substrate
auuuggacauauugccc

SEQ ID NO: 3775 - RNA, 17 nt, artificial sequence
  misc_feature: oligonucleotide substrate
uuggacauauugccccc

SEQ ID NO: 3776 - RNA, 17 nt, artificial sequence
  misc_feature: oligonucleotide substrate
gacauauugccccccac

SEQ ID NO: 3777 - RNA, 17 nt, artificial sequence
  misc_feature: oligonucleotide substrate
ugccccccaccgacuuu

SEQ ID NO: 3778 - RNA, 17 nt, artificial sequence
  misc_feature: oligonucleotide substrate
ccccaccgacuuuccgc

SEQ ID NO: 3779 - RNA, 17 nt, artificial sequence
  misc_feature: oligonucleotide substrate
gacuuuccgcaccaaaa

SEQ ID NO: 3780 - RNA, 17 nt, artificial sequence
  misc_feature: oligonucleotide substrate
cuuuccgcaccaaaaug

SEQ ID NO: 3781 - RNA, 17 nt, artificial sequence
  misc_feature: oligonucleotide substrate
gcaccaaaaugcauuca

SEQ ID NO: 3782 - RNA, 17 nt, artificial sequence
  misc_feature: oligonucleotide substrate
accaaaaugcauucacg

SEQ ID NO: 3783 - RNA, 17 nt, artificial sequence
  misc_feature: oligonucleotide substrate
caaaaugcauucacgga

SEQ ID NO: 3784 - RNA, 17 nt, artificial sequence
  misc_feature: oligonucleotide substrate
augcauucacggaugac

SEQ ID NO: 3785 - RNA, 17 nt, artificial sequence
  misc_feature: oligonucleotide substrate
auucacggaugaccccu

SEQ ID NO: 3786 - RNA, 17 nt, artificial sequence
  misc_feature: oligonucleotide substrate
cacggaugaccccuuga

SEQ ID NO: 3787 - RNA, 17 nt, artificial sequence
  misc_feature: oligonucleotide substrate
ccccuugagcccgcaca

SEQ ID NO: 3788 - RNA, 17 nt, artificial sequence
  misc_feature: oligonucleotide substrate
uugagcccgcacaaagu

SEQ ID NO: 3789 - RNA, 17 nt, artificial sequence
  misc_feature: oligonucleotide substrate
gagcccgcacaaagucc

SEQ ID NO: 3790 - RNA, 17 nt, artificial sequence
  misc_feature: oligonucleotide substrate
cgcacaaaguccggcac

SEQ ID NO: 3791 - RNA, 17 nt, artificial sequence
  misc_feature: oligonucleotide substrate
aaaguccggcacuuuug

SEQ ID NO: 3792 - RNA, 17 nt, artificial sequence
  misc_feature: oligonucleotide substrate
aguccggcacuuuugcu

SEQ ID NO: 3793 - RNA, 17 nt, artificial sequence
  misc_feature: oligonucleotide substrate
gcacuuuugcuauacca

SEQ ID NO: 3794 - RNA, 17 nt, artificial sequence
  misc_feature: oligonucleotide substrate
cuuuugcuauaccagcc

SEQ ID NO: 3795 - RNA, 17 nt, artificial sequence
  misc_feature: oligonucleotide substrate
uuugcuauaccagccug

SEQ ID NO: 3796 - RNA, 17 nt, artificial sequence
  misc_feature: oligonucleotide substrate
cuauaccagccuggagc

SEQ ID NO: 3797 - RNA, 17 nt, artificial sequence
  misc_feature: oligonucleotide substrate
agccuggagcaccauga

SEQ ID NO: 3798 - RNA, 17 nt, artificial sequence
  misc_feature: oligonucleotide substrate
ccuggagcaccaugagc

SEQ ID NO: 3799 - RNA, 17 nt, artificial sequence
  misc_feature: oligonucleotide substrate
ggagcaccaugagcggg

SEQ ID NO: 3800 - RNA, 17 nt, artificial sequence
  misc_feature: oligonucleotide substrate
caccaugagcgggccga

SEQ ID NO: 3801 - RNA, 17 nt, artificial sequence
  misc_feature: oligonucleotide substrate
augagcgggccgaguau

SEQ ID NO: 3802 - RNA, 17 nt, artificial sequence
  misc_feature: oligonucleotide substrate
cgggccgaguauggcga

SEQ ID NO: 3803 - RNA, 17 nt, artificial sequence
  misc_feature: oligonucleotide substrate
ggccgaguauggcgagc

SEQ ID NO: 3804 - RNA, 17 nt, artificial sequence
  misc_feature: oligonucleotide substrate
cgaguauggcgagcaua

SEQ ID NO: 3805 - RNA, 17 nt, artificial sequence
  misc_feature: oligonucleotide substrate
uauggcgagcauaauuu

SEQ ID NO: 3806 - RNA, 17 nt, artificial sequence
  misc_feature: oligonucleotide substrate
uggcgagcauaauuuug

SEQ ID NO: 3807 - RNA, 17 nt, artificial sequence
  misc_feature: oligonucleotide substrate
cgagcauaauuuuggug

SEQ ID NO: 3808 - RNA, 17 nt, artificial sequence
  misc_feature: oligonucleotide substrate
uaauuuuggugauguca

SEQ ID NO: 3809 - RNA, 17 nt, artificial sequence
  misc_feature: oligonucleotide substrate
uuuuggugaugucaaag

SEQ ID NO: 3810 - RNA, 17 nt, artificial sequence
  misc_feature: oligonucleotide substrate
uuggugaugucaaagau

SEQ ID NO: 3811 - RNA, 17 nt, artificial sequence
  misc_feature: oligonucleotide substrate
ugucaaagauuagcucu

SEQ ID NO: 3812 - RNA, 17 nt, artificial sequence
  misc_feature: oligonucleotide substrate
aaagauuagcucugggu

SEQ ID NO: 3813 - RNA, 17 nt, artificial sequence
  misc_feature: oligonucleotide substrate
agcucuggguggaccac

SEQ ID NO: 3814 - RNA, 17 nt, artificial sequence
  misc_feature: oligonucleotide substrate
cuggguggaccacacac

SEQ ID NO: 3815 - RNA, 17 nt, artificial sequence
  misc_feature: oligonucleotide substrate
gguggaccacacacgug

SEQ ID NO: 3816 - RNA, 17 nt, artificial sequence
  misc_feature: oligonucleotide substrate
uggaccacacacgugag

SEQ ID NO: 3817 - RNA, 17 nt, artificial sequence
  misc_feature: oligonucleotide substrate
gaccacacacgugagga

SEQ ID NO: 3818 - RNA, 17 nt, artificial sequence
  misc_feature: oligonucleotide substrate
ccacacacgugaggaga

SEQ ID NO: 3819 - RNA, 17 nt, artificial sequence
  misc_feature: oligonucleotide substrate
ugaggagaaugauggca

SEQ ID NO: 3820 - RNA, 17 nt, artificial sequence
  misc_feature: oligonucleotide substrate
ggagaaugauggcaccg

SEQ ID NO: 3821 - RNA, 17 nt, artificial sequence
  misc_feature: oligonucleotide substrate
gaaugauggcaccgcgc

SEQ ID NO: 3822 - RNA, 17 nt, artificial sequence
  misc_feature: oligonucleotide substrate
augauggcaccgcgccc

SEQ ID NO: 3823 - RNA, 17 nt, artificial sequence
  misc_feature: oligonucleotide substrate
auggcaccgcgcccccc

SEQ ID NO: 3824 - RNA, 17 nt, artificial sequence
  misc_feature: oligonucleotide substrate
ggcaccgcgcccccccc

SEQ ID NO: 3825 - RNA, 17 nt, artificial sequence
  misc_feature: oligonucleotide substrate
ccccccgaacguugagg

SEQ ID NO: 3826 - RNA, 17 nt, artificial sequence
  misc_feature: oligonucleotide substrate
ccccgaacguugagggg

SEQ ID NO: 3827 - RNA, 17 nt, artificial sequence
  misc_feature: oligonucleotide substrate
ggggggggauccacacu

SEQ ID NO: 3828 - RNA, 17 nt, artificial sequence
  misc_feature: oligonucleotide substrate
ggggauccacacuugca

SEQ ID NO: 3829 - RNA, 17 nt, artificial sequence
  misc_feature: oligonucleotide substrate
ggauccacacuugcaac

SEQ ID NO: 3830 - RNA, 17 nt, artificial sequence
  misc_feature: oligonucleotide substrate
ccacacuugcaacugcg

SEQ ID NO: 3831 - RNA, 17 nt, artificial sequence
  misc_feature: oligonucleotide substrate
cacuugcaacugcgccu

SEQ ID NO: 3832 - RNA, 17 nt, artificial sequence
  misc_feature: oligonucleotide substrate
uugcaacugcgccucgg

SEQ ID NO: 3833 - RNA, 17 nt, artificial sequence
  misc_feature: oligonucleotide substrate
gcaacugcgccucggcu

SEQ ID NO: 3834 - RNA, 17 nt, artificial sequence
  misc_feature: oligonucleotide substrate
gcgccucggcucuggug

SEQ ID NO: 3835 - RNA, 17 nt, artificial sequence
  misc_feature: oligonucleotide substrate
cggcucuggugauaagg

SEQ ID NO: 3836 - RNA, 17 nt, artificial sequence
  misc_feature: oligonucleotide substrate
cucuggugauaagguau

SEQ ID NO: 3837 - RNA, 17 nt, artificial sequence
  misc_feature: oligonucleotide substrate
gugauaagguauugcaa

SEQ ID NO: 3838 - RNA, 17 nt, artificial sequence
  misc_feature: oligonucleotide substrate
gauaagguauugcaacc

SEQ ID NO: 3839 - RNA, 17 nt, artificial sequence
  misc_feature: oligonucleotide substrate
aagguauugcaaccacc

SEQ ID NO: 3840 - RNA, 17 nt, artificial sequence
  misc_feature: oligonucleotide substrate
guauugcaaccaccaua

SEQ ID NO: 3841 - RNA, 17 nt, artificial sequence
  misc_feature: oligonucleotide substrate
uugcaaccaccauauga

SEQ ID NO: 3842 - RNA, 17 nt, artificial sequence
  misc_feature: oligonucleotide substrate
caaccaccauaugagcc

SEQ ID NO: 3843 - RNA, 17 nt, artificial sequence
  misc_feature: oligonucleotide substrate
accaccauaugagccua

SEQ ID NO: 3844 - RNA, 17 nt, artificial sequence
  misc_feature: oligonucleotide substrate
ccauaugagccuagcga

SEQ ID NO: 3845 - RNA, 17 nt, artificial sequence
  misc_feature: oligonucleotide substrate
ugagccuagcgaggaac

SEQ ID NO: 3846 - RNA, 17 nt, artificial sequence
  misc_feature: oligonucleotide substrate
agcgaggaacacuuugu

SEQ ID NO: 3847 - RNA, 17 nt, artificial sequence
  misc_feature: oligonucleotide substrate
cgaggaacacuuuguag

SEQ ID NO: 3848 - RNA, 17 nt, artificial sequence
  misc_feature: oligonucleotide substrate
aacacuuuguaguaugg

SEQ ID NO: 3849 - RNA, 17 nt, artificial sequence
  misc_feature: oligonucleotide substrate
acuuuguaguaugguga

SEQ ID NO: 3850 - RNA, 17 nt, artificial sequence
  misc_feature: oligonucleotide substrate
uuuguaguauggugaca

SEQ ID NO: 3851 - RNA, 17 nt, artificial sequence
  misc_feature: oligonucleotide substrate
guaguauggugacaagg

SEQ ID NO: 3852 - RNA, 17 nt, artificial sequence
  misc_feature: oligonucleotide substrate
guauggugacaagguca

SEQ ID NO: 3853 - RNA, 17 nt, artificial sequence
  misc_feature: oligonucleotide substrate
gugacaaggucaagagu

SEQ ID NO: 3854 - RNA, 17 nt, artificial sequence
  misc_feature: oligonucleotide substrate
ggucaagagugcuagac

SEQ ID NO: 3855 - RNA, 17 nt, artificial sequence
  misc_feature: oligonucleotide substrate
ucaagagugcuagaccu

SEQ ID NO: 3856 - RNA, 17 nt, artificial sequence
  misc_feature: oligonucleotide substrate
agugcuagaccuacaaa

SEQ ID NO: 3857 - RNA, 17 nt, artificial sequence
  misc_feature: oligonucleotide substrate
cuagaccuacaaaaacc

SEQ ID NO: 3858 - RNA, 17 nt, artificial sequence
  misc_feature: oligonucleotide substrate
cuacaaaaaccacgccu

SEQ ID NO: 3859 - RNA, 17 nt, artificial sequence
  misc_feature: oligonucleotide substrate
caaaaaccacgccuccg

SEQ ID NO: 3860 - RNA, 17 nt, artificial sequence
  misc_feature: oligonucleotide substrate
aaaaccacgccuccgca

SEQ ID NO: 3861 - RNA, 17 nt, artificial sequence
  misc_feature: oligonucleotide substrate
acgccuccgcacgaugc

SEQ ID NO: 3862 - RNA, 17 nt, artificial sequence
  misc_feature: oligonucleotide substrate
gccuccgcacgaugcgg

SEQ ID NO: 3863 - RNA, 17 nt, artificial sequence
  misc_feature: oligonucleotide substrate
uccgcacgaugcggcca

SEQ ID NO: 3864 - RNA, 17 nt, artificial sequence
  misc_feature: oligonucleotide substrate
cgcacgaugcggccauc

SEQ ID NO: 3865 - RNA, 17 nt, artificial sequence
  misc_feature: oligonucleotide substrate
acgaugcggccaucucc

SEQ ID NO: 3866 - RNA, 17 nt, artificial sequence
  misc_feature: oligonucleotide substrate
augcggccaucucccgg

SEQ ID NO: 3867 - RNA, 17 nt, artificial sequence
  misc_feature: oligonucleotide substrate
aucucccgguccauggc

SEQ ID NO: 3868 - RNA, 17 nt, artificial sequence
  misc_feature: oligonucleotide substrate
cccgguccauggcguac

SEQ ID NO: 3869 - RNA, 17 nt, artificial sequence
  misc_feature: oligonucleotide substrate
gguccauggcguacgcc

SEQ ID NO: 3870 - RNA, 17 nt, artificial sequence
  misc_feature: oligonucleotide substrate
uccauggcguacgcccg

SEQ ID NO: 3871 - RNA, 17 nt, artificial sequence
  misc_feature: oligonucleotide substrate
cauggcguacgcccgug

SEQ ID NO: 3872 - RNA, 17 nt, artificial sequence
  misc_feature: oligonucleotide substrate
uggcguacgcccguggu

SEQ ID NO: 3873 - RNA, 17 nt, artificial sequence
  misc_feature: oligonucleotide substrate
guacgcccgugguggua

SEQ ID NO: 3874 - RNA, 17 nt, artificial sequence
  misc_feature: oligonucleotide substrate
cgcccguggugguaacg

SEQ ID NO: 3875 - RNA, 17 nt, artificial sequence
  misc_feature: oligonucleotide substrate
ccguggugguaacgcca

SEQ ID NO: 3876 - RNA, 17 nt, artificial sequence
  misc_feature: oligonucleotide substrate
uggugguaacgccagca

SEQ ID NO: 3877 - RNA, 17 nt, artificial sequence
  misc_feature: oligonucleotide substrate
gugguaacgccagcagg

SEQ ID NO: 3878 - RNA, 17 nt, artificial sequence
  misc_feature: oligonucleotide substrate
uaacgccagcaggagca

SEQ ID NO: 3879 - RNA, 17 nt, artificial sequence
  misc_feature: oligonucleotide substrate
cagcaggagcaggagua

SEQ ID NO: 3880 - RNA, 17 nt, artificial sequence
  misc_feature: oligonucleotide substrate
gagcaggaguagcggcc

SEQ ID NO: 3881 - RNA, 17 nt, artificial sequence
  misc_feature: oligonucleotide substrate
caggaguagcggccaua

SEQ ID NO: 3882 - RNA, 17 nt, artificial sequence
  misc_feature: oligonucleotide substrate
gaguagcggccauacgc

SEQ ID NO: 3883 - RNA, 17 nt, artificial sequence
  misc_feature: oligonucleotide substrate
uagcggccauacgccgu

SEQ ID NO: 3884 - RNA, 17 nt, artificial sequence
  misc_feature: oligonucleotide substrate
gcggccauacgccguag

SEQ ID NO: 3885 - RNA, 17 nt, artificial sequence
  misc_feature: oligonucleotide substrate
ggccauacgccguagag

SEQ ID NO: 3886 - RNA, 17 nt, artificial sequence
  misc_feature: oligonucleotide substrate
cauacgccguagagagc

SEQ ID NO: 3887 - RNA, 17 nt, artificial sequence
  misc_feature: oligonucleotide substrate
cguagagagcauaugcc

SEQ ID NO: 3888 - RNA, 17 nt, artificial sequence
  misc_feature: oligonucleotide substrate
uagagagcauaugccgc

SEQ ID NO: 3889 - RNA, 17 nt, artificial sequence
  misc_feature: oligonucleotide substrate
gagagcauaugccgccc

SEQ ID NO: 3890 - RNA, 17 nt, artificial sequence
  misc_feature: oligonucleotide substrate
gagcauaugccgcccca

SEQ ID NO: 3891 - RNA, 17 nt, artificial sequence
  misc_feature: oligonucleotide substrate
cauaugccgccccaggg

SEQ ID NO: 3892 - RNA, 17 nt, artificial sequence
  misc_feature: oligonucleotide substrate
ccccagggaccagcuug

SEQ ID NO: 3893 - RNA, 17 nt, artificial sequence
  misc_feature: oligonucleotide substrate
agggaccagcuugccuu

SEQ ID NO: 3894 - RNA, 17 nt, artificial sequence
  misc_feature: oligonucleotide substrate
accagcuugccuuugau

SEQ ID NO: 3895 - RNA, 17 nt, artificial sequence
  misc_feature: oligonucleotide substrate
ugccuuugauguaccag

SEQ ID NO: 3896 - RNA, 17 nt, artificial sequence
  misc_feature: oligonucleotide substrate
ccuuugauguaccaggc

SEQ ID NO: 3897 - RNA, 17 nt, artificial sequence
  misc_feature: oligonucleotide substrate
uuugauguaccaggcag

SEQ ID NO: 3898 - RNA, 17 nt, artificial sequence
  misc_feature: oligonucleotide substrate
uguaccaggcagcacag

SEQ ID NO: 3899 - RNA, 17 nt, artificial sequence
  misc_feature: oligonucleotide substrate
accaggcagcacagaag

SEQ ID NO: 3900 - RNA, 17 nt, artificial sequence
  misc_feature: oligonucleotide substrate
caggcagcacagaagaa

SEQ ID NO: 3901 - RNA, 17 nt, artificial sequence
  misc_feature: oligonucleotide substrate
acagaagaacacgagga

SEQ ID NO: 3902 - RNA, 17 nt, artificial sequence
  misc_feature: oligonucleotide substrate
agaagaacacgaggaag

SEQ ID NO: 3903 - RNA, 17 nt, artificial sequence
  misc_feature: oligonucleotide substrate
aggagaggaugccaugc

SEQ ID NO: 3904 - RNA, 17 nt, artificial sequence
  misc_feature: oligonucleotide substrate
gagaggaugccaugcac

SEQ ID NO: 3905 - RNA, 17 nt, artificial sequence
  misc_feature: oligonucleotide substrate
aggaugccaugcacucc

SEQ ID NO: 3906 - RNA, 17 nt, artificial sequence
  misc_feature: oligonucleotide substrate
gaugccaugcacuccgg

SEQ ID NO: 3907 - RNA, 17 nt, artificial sequence
  misc_feature: oligonucleotide substrate
ugccaugcacuccggcc

SEQ ID NO: 3908 - RNA, 17 nt, artificial sequence
  misc_feature: oligonucleotide substrate
gcacuccggccaaggau

SEQ ID NO: 3909 - RNA, 17 nt, artificial sequence
  misc_feature: oligonucleotide substrate
ggccaaggaugcugcau

SEQ ID NO: 3910 - RNA, 17 nt, artificial sequence
  misc_feature: oligonucleotide substrate
ccaaggaugcugcauug

SEQ ID NO: 3911 - RNA, 17 nt, artificial sequence
  misc_feature: oligonucleotide substrate
aggaugcugcauugagg

SEQ ID NO: 3912 - RNA, 17 nt, artificial sequence
  misc_feature: oligonucleotide substrate
gaugcugcauugaggac

SEQ ID NO: 3913 - RNA, 17 nt, artificial sequence
  misc_feature: oligonucleotide substrate
cauugaggaccaccagg

SEQ ID NO: 3914 - RNA, 17 nt, artificial sequence
  misc_feature: oligonucleotide substrate
ugaggaccaccagguuc

SEQ ID NO: 3915 - RNA, 17 nt, artificial sequence
  misc_feature: oligonucleotide substrate
accaccagguucucuag

SEQ ID NO: 3916 - RNA, 17 nt, artificial sequence
  misc_feature: oligonucleotide substrate
ucucuagggcagccucg

SEQ ID NO: 3917 - RNA, 17 nt, artificial sequence
  misc_feature: oligonucleotide substrate
cuagggcagccucggcc

SEQ ID NO: 3918 - RNA, 17 nt, artificial sequence
  misc_feature: oligonucleotide substrate
cagccucggccugggcu

SEQ ID NO: 3919 - RNA, 17 nt, artificial sequence
  misc_feature: oligonucleotide substrate
cggccugggcuaccaac

SEQ ID NO: 3920 - RNA, 17 nt, artificial sequence
  misc_feature: oligonucleotide substrate
ccugggcuaccaacagc

SEQ ID NO: 3921 - RNA, 17 nt, artificial sequence
  misc_feature: oligonucleotide substrate
ggcuaccaacagcauca

SEQ ID NO: 3922 - RNA, 17 nt, artificial sequence
  misc_feature: oligonucleotide substrate
uaccaacagcaucaucc

SEQ ID NO: 3923 - RNA, 17 nt, artificial sequence
  misc_feature: oligonucleotide substrate
ccaacagcaucauccac

SEQ ID NO: 3924 - RNA, 17 nt, artificial sequence
  misc_feature: oligonucleotide substrate
acagcaucauccacaaa

SEQ ID NO: 3925 - RNA, 17 nt, artificial sequence
  misc_feature: oligonucleotide substrate
caucauccacaaacagg

SEQ ID NO: 3926 - RNA, 17 nt, artificial sequence
  misc_feature: oligonucleotide substrate
auccacaaacaggcaca

SEQ ID NO: 3927 - RNA, 17 nt, artificial sequence
  misc_feature: oligonucleotide substrate
acaaacaggcacagacg

SEQ ID NO: 3928 - RNA, 17 nt, artificial sequence
  misc_feature: oligonucleotide substrate
aaacaggcacagacgcg

SEQ ID NO: 3929 - RNA, 17 nt, artificial sequence
  misc_feature: oligonucleotide substrate
aggcacagacgcgcgcg

SEQ ID NO: 3930 - RNA, 17 nt, artificial sequence
  misc_feature: oligonucleotide substrate
gcacagacgcgcgcguc

SEQ ID NO: 3931 - RNA, 17 nt, artificial sequence
  misc_feature: oligonucleotide substrate
acagacgcgcgcgucug

SEQ ID NO: 3932 - RNA, 17 nt, artificial sequence
  misc_feature: oligonucleotide substrate
agacgcgcgcgucugcc

SEQ ID NO: 3933 - RNA, 17 nt, artificial sequence
  misc_feature: oligonucleotide substrate
acgcgcgcgucugccag

SEQ ID NO: 3934 - RNA, 17 nt, artificial sequence
  misc_feature: oligonucleotide substrate
gcgcgucugccaggaga

SEQ ID NO: 3935 - RNA, 17 nt, artificial sequence
  misc_feature: oligonucleotide substrate
aaggaaaagcaacagga

SEQ ID NO: 3936 - RNA, 17 nt, artificial sequence
  misc_feature: oligonucleotide substrate
gaaaagcaacaggacau

SEQ ID NO: 3937 - RNA, 17 nt, artificial sequence
  misc_feature: oligonucleotide substrate
gcaacaggacauacucc

SEQ ID NO: 3938 - RNA, 17 nt, artificial sequence
  misc_feature: oligonucleotide substrate
aacaggacauacuccca

SEQ ID NO: 3939 - RNA, 17 nt, artificial sequence
  misc_feature: oligonucleotide substrate
caggacauacucccauu

SEQ ID NO: 3940 - RNA, 17 nt, artificial sequence
  misc_feature: oligonucleotide substrate
auacucccauuugauug

SEQ ID NO: 3941 - RNA, 17 nt, artificial sequence
  misc_feature: oligonucleotide substrate
cccauuugauugcgaag

SEQ ID NO: 3942 - RNA, 17 nt, artificial sequence
  misc_feature: oligonucleotide substrate
auuugauugcgaaggag

SEQ ID NO: 3943 - RNA, 17 nt, artificial sequence
  misc_feature: oligonucleotide substrate
cgaaggagacaaccgcu

SEQ ID NO: 3944 - RNA, 17 nt, artificial sequence
  misc_feature: oligonucleotide substrate
aggagacaaccgcugac

SEQ ID NO: 3945 - RNA, 17 nt, artificial sequence
  misc_feature: oligonucleotide substrate
agacaaccgcugacccu

SEQ ID NO: 3946 - RNA, 17 nt, artificial sequence
  misc_feature: oligonucleotide substrate
aaccgcugacccuacac

SEQ ID NO: 3947 - RNA, 17 nt, artificial sequence
  misc_feature: oligonucleotide substrate
cugacccuacaccguac

SEQ ID NO: 3948 - RNA, 17 nt, artificial sequence
  misc_feature: oligonucleotide substrate
gacccuacaccguacag

SEQ ID NO: 3949 - RNA, 17 nt, artificial sequence
  misc_feature: oligonucleotide substrate
ccuacaccguacaggua

SEQ ID NO: 3950 - RNA, 17 nt, artificial sequence
  misc_feature: oligonucleotide substrate
uacaccguacagguauu

SEQ ID NO: 3951 - RNA, 17 nt, artificial sequence
  misc_feature: oligonucleotide substrate
ccguacagguauugcac

SEQ ID NO: 3952 - RNA, 17 nt, artificial sequence
  misc_feature: oligonucleotide substrate
guacagguauugcacgu

SEQ ID NO: 3953 - RNA, 17 nt, artificial sequence
  misc_feature: oligonucleotide substrate
cagguauugcacgucca

SEQ ID NO: 3954 - RNA, 17 nt, artificial sequence
  misc_feature: oligonucleotide substrate
gguauugcacguccacg

SEQ ID NO: 3955 - RNA, 17 nt, artificial sequence
  misc_feature: oligonucleotide substrate
uauugcacguccacgau

SEQ ID NO: 3956 - RNA, 17 nt, artificial sequence
  misc_feature: oligonucleotide substrate
gcacguccacgauguuc

SEQ ID NO: 3957 - RNA, 17 nt, artificial sequence
  misc_feature: oligonucleotide substrate
cguccacgauguucugg

SEQ ID NO: 3958 - RNA, 17 nt, artificial sequence
  misc_feature: oligonucleotide substrate
uccacgauguucuggug

SEQ ID NO: 3959 - RNA, 17 nt, artificial sequence
  misc_feature: oligonucleotide substrate
auguucugguggagaug

SEQ ID NO: 3960 - RNA, 17 nt, artificial sequence
  misc_feature: oligonucleotide substrate
ugguggagauggaucaa

SEQ ID NO: 3961 - RNA, 17 nt, artificial sequence
  misc_feature: oligonucleotide substrate
ggagauggaucaaacca

SEQ ID NO: 3962 - RNA, 17 nt, artificial sequence
  misc_feature: oligonucleotide substrate
uggaucaaaccagugga

SEQ ID NO: 3963 - RNA, 17 nt, artificial sequence
  misc_feature: oligonucleotide substrate
ucaaaccaguggacaga

SEQ ID NO: 3964 - RNA, 17 nt, artificial sequence
  misc_feature: oligonucleotide substrate
accaguggacagagccg

SEQ ID NO: 3965 - RNA, 17 nt, artificial sequence
  misc_feature: oligonucleotide substrate
uggacagagccgguagg

SEQ ID NO: 3966 - RNA, 17 nt, artificial sequence
  misc_feature: oligonucleotide substrate
cagagccgguagggugg

SEQ ID NO: 3967 - RNA, 17 nt, artificial sequence
  misc_feature: oligonucleotide substrate
ccgguaggguggugaag

SEQ ID NO: 3968 - RNA, 17 nt, artificial sequence
  misc_feature: oligonucleotide substrate
guaggguggugaaggag

SEQ ID NO: 3969 - RNA, 17 nt, artificial sequence
  misc_feature: oligonucleotide substrate
gugaaggagcagggcag

SEQ ID NO: 3970 - RNA, 17 nt, artificial sequence
  misc_feature: oligonucleotide substrate
ggagcagggcaguauuu

SEQ ID NO: 3971 - RNA, 17 nt, artificial sequence
  misc_feature: oligonucleotide substrate
gcagggcaguauuugcc

SEQ ID NO: 3972 - RNA, 17 nt, artificial sequence
  misc_feature: oligonucleotide substrate
agggcaguauuugccac

SEQ ID NO: 3973 - RNA, 17 nt, artificial sequence
  misc_feature: oligonucleotide substrate
caguauuugccacucug

SEQ ID NO: 3974 - RNA, 17 nt, artificial sequence
  misc_feature: oligonucleotide substrate
uauuugccacucuguag

SEQ ID NO: 3975 - RNA, 17 nt, artificial sequence
  misc_feature: oligonucleotide substrate
gccacucuguaguggac

SEQ ID NO: 3976 - RNA, 17 nt, artificial sequence
  misc_feature: oligonucleotide substrate
acucuguaguggacaac

SEQ ID NO: 3977 - RNA, 17 nt, artificial sequence
  misc_feature: oligonucleotide substrate
uguaguggacaacagca

SEQ ID NO: 3978 - RNA, 17 nt, artificial sequence
  misc_feature: oligonucleotide substrate
aguggacaacagcagcg

SEQ ID NO: 3979 - RNA, 17 nt, artificial sequence
  misc_feature: oligonucleotide substrate
ggacaacagcagcgggc

SEQ ID NO: 3980 - RNA, 17 nt, artificial sequence
  misc_feature: oligonucleotide substrate
caacagcagcgggcuga

SEQ ID NO: 3981 - RNA, 17 nt, artificial sequence
  misc_feature: oligonucleotide substrate
agcagcgggcugagcuc

SEQ ID NO: 3982 - RNA, 17 nt, artificial sequence
  misc_feature: oligonucleotide substrate
cgggcugagcucugauc

SEQ ID NO: 3983 - RNA, 17 nt, artificial sequence
  misc_feature: oligonucleotide substrate
gagcucugaucuguccc

SEQ ID NO: 3984 - RNA, 17 nt, artificial sequence
  misc_feature: oligonucleotide substrate
ucugaucugucccuguc

SEQ ID NO: 3985 - RNA, 17 nt, artificial sequence
  misc_feature: oligonucleotide substrate
cugucccuguccuccaa

SEQ ID NO: 3986 - RNA, 17 nt, artificial sequence
  misc_feature: oligonucleotide substrate
uccuccaaaucacaacg

SEQ ID NO: 3987 - RNA, 17 nt, artificial sequence
  misc_feature: oligonucleotide substrate
uccaaaucacaacgcuc

SEQ ID NO: 3988 - RNA, 17 nt, artificial sequence
  misc_feature: oligonucleotide substrate
aaaucacaacgcucucc

SEQ ID NO: 3989 - RNA, 17 nt, artificial sequence
  misc_feature: oligonucleotide substrate
aucacaacgcucuccuc

SEQ ID NO: 3990 - RNA, 17 nt, artificial sequence
  misc_feature: oligonucleotide substrate
cuccucgaguccaauug

SEQ ID NO: 3991 - RNA, 17 nt, artificial sequence
  misc_feature: oligonucleotide substrate
cgaguccaauugcaugc

SEQ ID NO: 3992 - RNA, 17 nt, artificial sequence
  misc_feature: oligonucleotide substrate
guccaauugcaugcggc

SEQ ID NO: 3993 - RNA, 17 nt, artificial sequence
  misc_feature: oligonucleotide substrate
ccaauugcaugcggcgg

SEQ ID NO: 3994 - RNA, 17 nt, artificial sequence
  misc_feature: oligonucleotide substrate
aauugcaugcggcggug

SEQ ID NO: 3995 - RNA, 17 nt, artificial sequence
  misc_feature: oligonucleotide substrate
ugcaugcggcggugagc

SEQ ID NO: 3996 - RNA, 17 nt, artificial sequence
  misc_feature: oligonucleotide substrate
augcggcggugagccug

SEQ ID NO: 3997 - RNA, 17 nt, artificial sequence
  misc_feature: oligonucleotide substrate
ggcggugagccugugcu

SEQ ID NO: 3998 - RNA, 17 nt, artificial sequence
  misc_feature: oligonucleotide substrate
gugagccugugcuccac

SEQ ID NO: 3999 - RNA, 17 nt, artificial sequence
  misc_feature: oligonucleotide substrate
gagccugugcuccacgc

SEQ ID NO: 4000 - RNA, 17 nt, artificial sequence
  misc_feature: oligonucleotide substrate
ugugcuccacgcccccc

SEQ ID NO: 4001 - RNA, 17 nt, artificial sequence
  misc_feature: oligonucleotide substrate
ugcuccacgccccccac

SEQ ID NO: 4002 - RNA, 17 nt, artificial sequence
  misc_feature: oligonucleotide substrate
cgccccccacauacauc

SEQ ID NO: 4003 - RNA, 17 nt, artificial sequence
  misc_feature: oligonucleotide substrate
ccccccacauacauccu

SEQ ID NO: 4004 - RNA, 17 nt, artificial sequence
  misc_feature: oligonucleotide substrate
ccccacauacauccuaa

SEQ ID NO: 4005 - RNA, 17 nt, artificial sequence
  misc_feature: oligonucleotide substrate
ccacauacauccuaacc

SEQ ID NO: 4006 - RNA, 17 nt, artificial sequence
  misc_feature: oligonucleotide substrate
acauccuaaccuuaaag

SEQ ID NO: 4007 - RNA, 17 nt, artificial sequence
  misc_feature: oligonucleotide substrate
ccuuaaagauggaaaaa

SEQ ID NO: 4008 - RNA, 17 nt, artificial sequence
  misc_feature: oligonucleotide substrate
auggaaaaauugacagu

SEQ ID NO: 4009 - RNA, 17 nt, artificial sequence
  misc_feature: oligonucleotide substrate
aaaaauugacagugcag

SEQ ID NO: 4010 - RNA, 17 nt, artificial sequence
  misc_feature: oligonucleotide substrate
aauugacagugcagggg

SEQ ID NO: 4011 - RNA, 17 nt, artificial sequence
  misc_feature: oligonucleotide substrate
uugacagugcaggggua

SEQ ID NO: 4012 - RNA, 17 nt, artificial sequence
  misc_feature: oligonucleotide substrate
gugcagggguagugcca

SEQ ID NO: 4013 - RNA, 17 nt, artificial sequence
  misc_feature: oligonucleotide substrate
cagggguagugccaaag

SEQ ID NO: 4014 - RNA, 17 nt, artificial sequence
  misc_feature: oligonucleotide substrate
gggguagugccaaagcc

SEQ ID NO: 4015 - RNA, 17 nt, artificial sequence
  misc_feature: oligonucleotide substrate
gugccaaagccuguaug

SEQ ID NO: 4016 - RNA, 17 nt, artificial sequence
  misc_feature: oligonucleotide substrate
caaagccuguaugggua

SEQ ID NO: 4017 - RNA, 17 nt, artificial sequence
  misc_feature: oligonucleotide substrate
aagccuguauggguagu

SEQ ID NO: 4018 - RNA, 17 nt, artificial sequence
  misc_feature: oligonucleotide substrate
cuguauggguagucaac

SEQ ID NO: 4019 - RNA, 17 nt, artificial sequence
  misc_feature: oligonucleotide substrate
uauggguagucaacuau

SEQ ID NO: 4020 - RNA, 17 nt, artificial sequence
  misc_feature: oligonucleotide substrate
gguagucaacuaugcau

SEQ ID NO: 4021 - RNA, 17 nt, artificial sequence
  misc_feature: oligonucleotide substrate
agucaacuaugcaucua

SEQ ID NO: 4022 - RNA, 17 nt, artificial sequence
  misc_feature: oligonucleotide substrate
ucaacuaugcaucuagg

SEQ ID NO: 4023 - RNA, 17 nt, artificial sequence
  misc_feature: oligonucleotide substrate
aacuaugcaucuaggug

SEQ ID NO: 4024 - RNA, 17 nt, artificial sequence
  misc_feature: oligonucleotide substrate
gcaucuagguguuaacc

SEQ ID NO: 4025 - RNA, 17 nt, artificial sequence
  misc_feature: oligonucleotide substrate
aucuagguguuaaccaa

SEQ ID NO: 4026 - RNA, 17 nt, artificial sequence
  misc_feature: oligonucleotide substrate
agguguuaaccaaggcc

SEQ ID NO: 4027 - RNA, 17 nt, artificial sequence
  misc_feature: oligonucleotide substrate
uaaccaaggccccgaac

SEQ ID NO: 4028 - RNA, 17 nt, artificial sequence
  misc_feature: oligonucleotide substrate
ggccccgaaccgcacuu

SEQ ID NO: 4029 - RNA, 17 nt, artificial sequence
  misc_feature: oligonucleotide substrate
cccgaaccgcacuuugc

SEQ ID NO: 4030 - RNA, 17 nt, artificial sequence
  misc_feature: oligonucleotide substrate
cgaaccgcacuuugcgu

SEQ ID NO: 4031 - RNA, 17 nt, artificial sequence
  misc_feature: oligonucleotide substrate
cgcacuuugcguaagug

SEQ ID NO: 4032 - RNA, 17 nt, artificial sequence
  misc_feature: oligonucleotide substrate
cacuuugcguaaguggc

SEQ ID NO: 4033 - RNA, 17 nt, artificial sequence
  misc_feature: oligonucleotide substrate
uugcguaaguggccucg

SEQ ID NO: 4034 - RNA, 17 nt, artificial sequence
  misc_feature: oligonucleotide substrate
cguaaguggccucgggg

SEQ ID NO: 4035 - RNA, 17 nt, artificial sequence
  misc_feature: oligonucleotide substrate
gccucggggugcuuccg

SEQ ID NO: 4036 - RNA, 17 nt, artificial sequence
  misc_feature: oligonucleotide substrate
cucggggugcuuccgga

SEQ ID NO: 4037 - RNA, 17 nt, artificial sequence
  misc_feature: oligonucleotide substrate
uuccggaagcaguccgu

SEQ ID NO: 4038 - RNA, 17 nt, artificial sequence
  misc_feature: oligonucleotide substrate
cggaagcaguccguggg

SEQ ID NO: 4039 - RNA, 17 nt, artificial sequence
  misc_feature: oligonucleotide substrate
agcaguccguggggcag

SEQ ID NO: 4040 - RNA, 17 nt, artificial sequence
  misc_feature: oligonucleotide substrate
uccguggggcagguuaa

SEQ ID NO: 4041 - RNA, 17 nt, artificial sequence
  misc_feature: oligonucleotide substrate
uggggcagguuaaggug

SEQ ID NO: 4042 - RNA, 17 nt, artificial sequence
  misc_feature: oligonucleotide substrate
agguuaaggugucguua

SEQ ID NO: 4043 - RNA, 17 nt, artificial sequence
  misc_feature: oligonucleotide substrate
guuaaggugucguuacc

SEQ ID NO: 4044 - RNA, 17 nt, artificial sequence
  misc_feature: oligonucleotide substrate
aaggugucguuaccggc

SEQ ID NO: 4045 - RNA, 17 nt, artificial sequence
  misc_feature: oligonucleotide substrate
gugucguuaccggcccc

SEQ ID NO: 4046 - RNA, 17 nt, artificial sequence
  misc_feature: oligonucleotide substrate
cguuaccggcccccccg

SEQ ID NO: 4047 - RNA, 17 nt, artificial sequence
  misc_feature: oligonucleotide substrate
cccccccgauguugcac

SEQ ID NO: 4048 - RNA, 17 nt, artificial sequence
  misc_feature: oligonucleotide substrate
cccccgauguugcacgg

SEQ ID NO: 4049 - RNA, 17 nt, artificial sequence
  misc_feature: oligonucleotide substrate
ccgauguugcacggggg

SEQ ID NO: 4050 - RNA, 17 nt, artificial sequence
  misc_feature: oligonucleotide substrate
gauguugcacggggggc

SEQ ID NO: 4051 - RNA, 17 nt, artificial sequence
  misc_feature: oligonucleotide substrate
cacggggggcccccgca

SEQ ID NO: 4052 - RNA, 17 nt, artificial sequence
  misc_feature: oligonucleotide substrate
gggcccccgcacgucuu

SEQ ID NO: 4053 - RNA, 17 nt, artificial sequence
  misc_feature: oligonucleotide substrate
gcccccgcacgucuugg

SEQ ID NO: 4054 - RNA, 17 nt, artificial sequence
  misc_feature: oligonucleotide substrate
ccccgcacgucuuggug

SEQ ID NO: 4055 - RNA, 17 nt, artificial sequence
  misc_feature: oligonucleotide substrate
acgucuuggugaaccca

SEQ ID NO: 4056 - RNA, 17 nt, artificial sequence
  misc_feature: oligonucleotide substrate
cuuggugaacccagugc

SEQ ID NO: 4057 - RNA, 17 nt, artificial sequence
  misc_feature: oligonucleotide substrate
ugaacccagugccauuc

SEQ ID NO: 4058 - RNA, 17 nt, artificial sequence
  misc_feature: oligonucleotide substrate
aacccagugccauucau

SEQ ID NO: 4059 - RNA, 17 nt, artificial sequence
  misc_feature: oligonucleotide substrate
ccagugccauucaucca

SEQ ID NO: 4060 - RNA, 17 nt, artificial sequence
  misc_feature: oligonucleotide substrate
ugccauucauccaugug

SEQ ID NO: 4061 - RNA, 17 nt, artificial sequence
  misc_feature: oligonucleotide substrate
auucauccaugugcagc

SEQ ID NO: 4062 - RNA, 17 nt, artificial sequence
  misc_feature: oligonucleotide substrate
ucauccaugugcagccg

SEQ ID NO: 4063 - RNA, 17 nt, artificial sequence
  misc_feature: oligonucleotide substrate
auccaugugcagccgaa

SEQ ID NO: 4064 - RNA, 17 nt, artificial sequence
  misc_feature: oligonucleotide substrate
caugugcagccgaacca

SEQ ID NO: 4065 - RNA, 17 nt, artificial sequence
  misc_feature: oligonucleotide substrate
gcagccgaaccaguugc

SEQ ID NO: 4066 - RNA, 17 nt, artificial sequence
  misc_feature: oligonucleotide substrate
ccgaaccaguugccuug

SEQ ID NO: 4067 - RNA, 17 nt, artificial sequence
  misc_feature: oligonucleotide substrate
aaccaguugccuugcgg

SEQ ID NO: 4068 - RNA, 17 nt, artificial sequence
  misc_feature: oligonucleotide substrate
guugccuugcggcggcc

SEQ ID NO: 4069 - RNA, 17 nt, artificial sequence
  misc_feature: oligonucleotide substrate
gccuugcggcggccgcg

SEQ ID NO: 4070 - RNA, 17 nt, artificial sequence
  misc_feature: oligonucleotide substrate
uugcggcggccgcgugu

SEQ ID NO: 4071 - RNA, 17 nt, artificial sequence
  misc_feature: oligonucleotide substrate
cggcggccgcguguugu

SEQ ID NO: 4072 - RNA, 17 nt, artificial sequence
  misc_feature: oligonucleotide substrate
gcggccgcguguuguug

SEQ ID NO: 4073 - RNA, 17 nt, artificial sequence
  misc_feature: oligonucleotide substrate
ggccgcguguuguugag

SEQ ID NO: 4074 - RNA, 17 nt, artificial sequence
  misc_feature: oligonucleotide substrate
cgcguguuguugaggag

SEQ ID NO: 4075 - RNA, 17 nt, artificial sequence
  misc_feature: oligonucleotide substrate
guugaggagcagcacgu

SEQ ID NO: 4076 - RNA, 17 nt, artificial sequence
  misc_feature: oligonucleotide substrate
gaggagcagcacguccg

SEQ ID NO: 4077 - RNA, 17 nt, artificial sequence
  misc_feature: oligonucleotide substrate
ggagcagcacguccguc

SEQ ID NO: 4078 - RNA, 17 nt, artificial sequence
  misc_feature: oligonucleotide substrate
agcagcacguccgucuc

SEQ ID NO: 4079 - RNA, 17 nt, artificial sequence
  misc_feature: oligonucleotide substrate
gcacguccgucucguuc

SEQ ID NO: 4080 - RNA, 17 nt, artificial sequence
  misc_feature: oligonucleotide substrate
uccgucucguucgcccc

SEQ ID NO: 4081 - RNA, 17 nt, artificial sequence
  misc_feature: oligonucleotide substrate
ucucguucgccccccag

SEQ ID NO: 4082 - RNA, 17 nt, artificial sequence
  misc_feature: oligonucleotide substrate
gccccccaguuauacgu

SEQ ID NO: 4083 - RNA, 17 nt, artificial sequence
  misc_feature: oligonucleotide substrate
ccccaguuauacguggg

SEQ ID NO: 4084 - RNA, 17 nt, artificial sequence
  misc_feature: oligonucleotide substrate
ccaguuauacguggggg

SEQ ID NO: 4085 - RNA, 17 nt, artificial sequence
  misc_feature: oligonucleotide substrate
aguuauacgugggggcg

SEQ ID NO: 4086 - RNA, 17 nt, artificial sequence
  misc_feature: oligonucleotide substrate
acgugggggcgccgaaa

SEQ ID NO: 4087 - RNA, 17 nt, artificial sequence
  misc_feature: oligonucleotide substrate
gugggggcgccgaaacg

SEQ ID NO: 4088 - RNA, 17 nt, artificial sequence
  misc_feature: oligonucleotide substrate
gcgccgaaacggucggu

SEQ ID NO: 4089 - RNA, 17 nt, artificial sequence
  misc_feature: oligonucleotide substrate
ccgaaacggucggucgu

SEQ ID NO: 4090 - RNA, 17 nt, artificial sequence
  misc_feature: oligonucleotide substrate
aacggucggucgucccc

SEQ ID NO: 4091 - RNA, 17 nt, artificial sequence
  misc_feature: oligonucleotide substrate
ggucggucguccccacc

SEQ ID NO: 4092 - RNA, 17 nt, artificial sequence
  misc_feature: oligonucleotide substrate
ucguccccaccacaaca

SEQ ID NO: 4093 - RNA, 17 nt, artificial sequence
  misc_feature: oligonucleotide substrate
uccccaccacaacaggg

SEQ ID NO: 4094 - RNA, 17 nt, artificial sequence
  misc_feature: oligonucleotide substrate
ccaccacaacagggcuu

SEQ ID NO: 4095 - RNA, 17 nt, artificial sequence
  misc_feature: oligonucleotide substrate
acaacagggcuuggggu

SEQ ID NO: 4096 - RNA, 17 nt, artificial sequence
  misc_feature: oligonucleotide substrate
ggcuuggggugaagcaa

SEQ ID NO: 4097 - RNA, 17 nt, artificial sequence
  misc_feature: oligonucleotide substrate
ggggugaagcaauacac

SEQ ID NO: 4098 - RNA, 17 nt, artificial sequence
  misc_feature: oligonucleotide substrate
gugaagcaauacacugg

SEQ ID NO: 4099 - RNA, 17 nt, artificial sequence
  misc_feature: oligonucleotide substrate
gaagcaauacacuggac

SEQ ID NO: 4100 - RNA, 17 nt, artificial sequence
  misc_feature: oligonucleotide substrate
agcaauacacuggacca

SEQ ID NO: 4101 - RNA, 17 nt, artificial sequence
  misc_feature: oligonucleotide substrate
uacacuggaccacauac

SEQ ID NO: 4102 - RNA, 17 nt, artificial sequence
  misc_feature: oligonucleotide substrate
acuggaccacauaccug

SEQ ID NO: 4103 - RNA, 17 nt, artificial sequence
  misc_feature: oligonucleotide substrate
uggaccacauaccugcg

SEQ ID NO: 4104 - RNA, 17 nt, artificial sequence
  misc_feature: oligonucleotide substrate
gaccacauaccugcgau

SEQ ID NO: 4105 - RNA, 17 nt, artificial sequence
  misc_feature: oligonucleotide substrate
acauaccugcgaugcgg

SEQ ID NO: 4106 - RNA, 17 nt, artificial sequence
  misc_feature: oligonucleotide substrate
uaccugcgaugcgggua

SEQ ID NO: 4107 - RNA, 17 nt, artificial sequence
  misc_feature: oligonucleotide substrate
ccugcgaugcggguacg

SEQ ID NO: 4108 - RNA, 17 nt, artificial sequence
  misc_feature: oligonucleotide substrate
cgaugcggguacgauac

SEQ ID NO: 4109 - RNA, 17 nt, artificial sequence
  misc_feature: oligonucleotide substrate
augcggguacgauacca

SEQ ID NO: 4110 - RNA, 17 nt, artificial sequence
  misc_feature: oligonucleotide substrate
cggguacgauaccacac

SEQ ID NO: 4111 - RNA, 17 nt, artificial sequence
  misc_feature: oligonucleotide substrate
gguacgauaccacacgg

SEQ ID NO: 4112 - RNA, 17 nt, artificial sequence
  misc_feature: oligonucleotide substrate
acgauaccacacggccg

SEQ ID NO: 4113 - RNA, 17 nt, artificial sequence
  misc_feature: oligonucleotide substrate
gauaccacacggccgcg

SEQ ID NO: 4114 - RNA, 17 nt, artificial sequence
  misc_feature: oligonucleotide substrate
accacacggccgcggug

SEQ ID NO: 4115 - RNA, 17 nt, artificial sequence
  misc_feature: oligonucleotide substrate
acacggccgcggugcgu

SEQ ID NO: 4116 - RNA, 17 nt, artificial sequence
  misc_feature: oligonucleotide substrate
cggccgcggugcguagu

SEQ ID NO: 4117 - RNA, 17 nt, artificial sequence
  misc_feature: oligonucleotide substrate
gccgcggugcguagugc

SEQ ID NO: 4118 - RNA, 17 nt, artificial sequence
  misc_feature: oligonucleotide substrate
cgcggugcguagugcca

SEQ ID NO: 4119 - RNA, 17 nt, artificial sequence
  misc_feature: oligonucleotide substrate
ggugcguagugccagca

SEQ ID NO: 4120 - RNA, 17 nt, artificial sequence
  misc_feature: oligonucleotide substrate
ugcguagugccagcaau

SEQ ID NO: 4121 - RNA, 17 nt, artificial sequence
  misc_feature: oligonucleotide substrate
uagugccagcaauaggg

SEQ ID NO: 4122 - RNA, 17 nt, artificial sequence
  misc_feature: oligonucleotide substrate
ugccagcaauagggccu

SEQ ID NO: 4123 - RNA, 17 nt, artificial sequence
  misc_feature: oligonucleotide substrate
gcaauagggccucuggu

SEQ ID NO: 4124 - RNA, 17 nt, artificial sequence
  misc_feature: oligonucleotide substrate
ggccucugguccgaguu

SEQ ID NO: 4125 - RNA, 17 nt, artificial sequence
  misc_feature: oligonucleotide substrate
ugguccgaguuguggcc

SEQ ID NO: 4126 - RNA, 17 nt, artificial sequence
  misc_feature: oligonucleotide substrate
uccgaguuguggcccuc

SEQ ID NO: 4127 - RNA, 17 nt, artificial sequence
  misc_feature: oligonucleotide substrate
gaguuguggcccucggu

SEQ ID NO: 4128 - RNA, 17 nt, artificial sequence
  misc_feature: oligonucleotide substrate
ggcccucgguguaggug

SEQ ID NO: 4129 - RNA, 17 nt, artificial sequence
  misc_feature: oligonucleotide substrate
cccucgguguaggugau

SEQ ID NO: 4130 - RNA, 17 nt, artificial sequence
  misc_feature: oligonucleotide substrate
cgguguaggugauagga

SEQ ID NO: 4131 - RNA, 17 nt, artificial sequence
  misc_feature: oligonucleotide substrate
uguaggugauaggaccc

SEQ ID NO: 4132 - RNA, 17 nt, artificial sequence
  misc_feature: oligonucleotide substrate
gugauaggaccccaccc

SEQ ID NO: 4133 - RNA, 17 nt, artificial sequence
  misc_feature: oligonucleotide substrate
aggaccccaccccugag

SEQ ID NO: 4134 - RNA, 17 nt, artificial sequence
  misc_feature: oligonucleotide substrate
accccugagcgaacuug

SEQ ID NO: 4135 - RNA, 17 nt, artificial sequence
  misc_feature: oligonucleotide substrate
cugagcgaacuugucaa

SEQ ID NO: 4136 - RNA, 17 nt, artificial sequence
  misc_feature: oligonucleotide substrate
gcgaacuugucaaugga

SEQ ID NO: 4137 - RNA, 17 nt, artificial sequence
  misc_feature: oligonucleotide substrate
acuugucaauggagcgg

SEQ ID NO: 4138 - RNA, 17 nt, artificial sequence
  misc_feature: oligonucleotide substrate
ucaauggagcggcagcu

SEQ ID NO: 4139 - RNA, 17 nt, artificial sequence
  misc_feature: oligonucleotide substrate
auggagcggcagcuggc

SEQ ID NO: 4140 - RNA, 17 nt, artificial sequence
  misc_feature: oligonucleotide substrate
gagcggcagcuggccaa

SEQ ID NO: 4141 - RNA, 17 nt, artificial sequence
  misc_feature: oligonucleotide substrate
ggcagcuggccaagcgc

SEQ ID NO: 4142 - RNA, 17 nt, artificial sequence
  misc_feature: oligonucleotide substrate
cuggccaagcgcugugg

SEQ ID NO: 4143 - RNA, 17 nt, artificial sequence
  misc_feature: oligonucleotide substrate
ggccaagcgcugugggc

SEQ ID NO: 4144 - RNA, 17 nt, artificial sequence
  misc_feature: oligonucleotide substrate
caagcgcugugggcauc

SEQ ID NO: 4145 - RNA, 17 nt, artificial sequence
  misc_feature: oligonucleotide substrate
cgcugugggcauccgga

SEQ ID NO: 4146 - RNA, 17 nt, artificial sequence
  misc_feature: oligonucleotide substrate
cugugggcauccggacg

SEQ ID NO: 4147 - RNA, 17 nt, artificial sequence
  misc_feature: oligonucleotide substrate
gcauccggacgaguuga

SEQ ID NO: 4148 - RNA, 17 nt, artificial sequence
  misc_feature: oligonucleotide substrate
ccggacgaguugaaccu

SEQ ID NO: 4149 - RNA, 17 nt, artificial sequence
  misc_feature: oligonucleotide substrate
cgaguugaaccugugug

SEQ ID NO: 4150 - RNA, 17 nt, artificial sequence
  misc_feature: oligonucleotide substrate
uugaaccugugugcaua

SEQ ID NO: 4151 - RNA, 17 nt, artificial sequence
  misc_feature: oligonucleotide substrate
gaaccugugugcauaga

SEQ ID NO: 4152 - RNA, 17 nt, artificial sequence
  misc_feature: oligonucleotide substrate
accugugugcauagaac

SEQ ID NO: 4153 - RNA, 17 nt, artificial sequence
  misc_feature: oligonucleotide substrate
cugugugcauagaacag

SEQ ID NO: 4154 - RNA, 17 nt, artificial sequence
  misc_feature: oligonucleotide substrate
ugcauagaacagugcag

SEQ ID NO: 4155 - RNA, 17 nt, artificial sequence
  misc_feature: oligonucleotide substrate
auagaacagugcagcaa

SEQ ID NO: 4156 - RNA, 17 nt, artificial sequence
  misc_feature: oligonucleotide substrate
agaacagugcagcaaug

SEQ ID NO: 4157 - RNA, 17 nt, artificial sequence
  misc_feature: oligonucleotide substrate
acagugcagcaaugaac

SEQ ID NO: 4158 - RNA, 17 nt, artificial sequence
  misc_feature: oligonucleotide substrate
gugcagcaaugaacccg

SEQ ID NO: 4159 - RNA, 17 nt, artificial sequence
  misc_feature: oligonucleotide substrate
agcaaugaacccgguuu

SEQ ID NO: 4160 - RNA, 17 nt, artificial sequence
  misc_feature: oligonucleotide substrate
ugaacccgguuuggagg

SEQ ID NO: 4161 - RNA, 17 nt, artificial sequence
  misc_feature: oligonucleotide substrate
uggagggagucauugca

SEQ ID NO: 4162 - RNA, 17 nt, artificial sequence
  misc_feature: oligonucleotide substrate
agggagucauugcaguu

SEQ ID NO: 4163 - RNA, 17 nt, artificial sequence
  misc_feature: oligonucleotide substrate
gagucauugcaguucag

SEQ ID NO: 4164 - RNA, 17 nt, artificial sequence
  misc_feature: oligonucleotide substrate
ucauugcaguucagggc

SEQ ID NO: 4165 - RNA, 17 nt, artificial sequence
  misc_feature: oligonucleotide substrate
aguucagggcaguccug

SEQ ID NO: 4166 - RNA, 17 nt, artificial sequence
  misc_feature: oligonucleotide substrate
ucagggcaguccuguua

SEQ ID NO: 4167 - RNA, 17 nt, artificial sequence
  misc_feature: oligonucleotide substrate
gcaguccuguuaaugug

SEQ ID NO: 4168 - RNA, 17 nt, artificial sequence
  misc_feature: oligonucleotide substrate
uccuguuaaugugccag

SEQ ID NO: 4169 - RNA, 17 nt, artificial sequence
  misc_feature: oligonucleotide substrate
cuguuaaugugccagcu

SEQ ID NO: 4170 - RNA, 17 nt, artificial sequence
  misc_feature: oligonucleotide substrate
guuaaugugccagcugc

SEQ ID NO: 4171 - RNA, 17 nt, artificial sequence
  misc_feature: oligonucleotide substrate
augugccagcugccguu

SEQ ID NO: 4172 - RNA, 17 nt, artificial sequence
  misc_feature: oligonucleotide substrate
ugccagcugccguuggu

SEQ ID NO: 4173 - RNA, 17 nt, artificial sequence
  misc_feature: oligonucleotide substrate
cagcugccguugguguu

SEQ ID NO: 4174 - RNA, 17 nt, artificial sequence
  misc_feature: oligonucleotide substrate
ugccguugguguuaaua

SEQ ID NO: 4175 - RNA, 17 nt, artificial sequence
  misc_feature: oligonucleotide substrate
ccguugguguuaauaag

SEQ ID NO: 4176 - RNA, 17 nt, artificial sequence
  misc_feature: oligonucleotide substrate
ugguguuaauaagcugg

SEQ ID NO: 4177 - RNA, 17 nt, artificial sequence
  misc_feature: oligonucleotide substrate
guuaauaagcuggauau

SEQ ID NO: 4178 - RNA, 17 nt, artificial sequence
  misc_feature: oligonucleotide substrate
uaagcuggauauucuga

SEQ ID NO: 4179 - RNA, 17 nt, artificial sequence
  misc_feature: oligonucleotide substrate
agcuggauauucugaga

SEQ ID NO: 4180 - RNA, 17 nt, artificial sequence
  misc_feature: oligonucleotide substrate
auucugagaugcuccag

SEQ ID NO: 4181 - RNA, 17 nt, artificial sequence
  misc_feature: oligonucleotide substrate
ucugagaugcuccagau

SEQ ID NO: 4182 - RNA, 17 nt, artificial sequence
  misc_feature: oligonucleotide substrate
ugcuccagauguaaaga

SEQ ID NO: 4183 - RNA, 17 nt, artificial sequence
  misc_feature: oligonucleotide substrate
cuccagauguaaagagg

SEQ ID NO: 4184 - RNA, 17 nt, artificial sequence
  misc_feature: oligonucleotide substrate
aaagagggaugccaccc

SEQ ID NO: 4185 - RNA, 17 nt, artificial sequence
  misc_feature: oligonucleotide substrate
agagggaugccacccua

SEQ ID NO: 4186 - RNA, 17 nt, artificial sequence
  misc_feature: oligonucleotide substrate
gggaugccacccuacua

SEQ ID NO: 4187 - RNA, 17 nt, artificial sequence
  misc_feature: oligonucleotide substrate
gccacccuacuaguggu

SEQ ID NO: 4188 - RNA, 17 nt, artificial sequence
  misc_feature: oligonucleotide substrate
cccuacuaguggugugg

SEQ ID NO: 4189 - RNA, 17 nt, artificial sequence
  misc_feature: oligonucleotide substrate
uacuagugguguggccc

SEQ ID NO: 4190 - RNA, 17 nt, artificial sequence
  misc_feature: oligonucleotide substrate
cuagugguguggcccug

SEQ ID NO: 4191 - RNA, 17 nt, artificial sequence
  misc_feature: oligonucleotide substrate
gugguguggcccugcgc

SEQ ID NO: 4192 - RNA, 17 nt, artificial sequence
  misc_feature: oligonucleotide substrate
guggcccugcgcccccc

SEQ ID NO: 4193 - RNA, 17 nt, artificial sequence
  misc_feature: oligonucleotide substrate
ggcccugcgcccccccu

SEQ ID NO: 4194 - RNA, 17 nt, artificial sequence
  misc_feature: oligonucleotide substrate
cccccccugucguguag

SEQ ID NO: 4195 - RNA, 17 nt, artificial sequence
  misc_feature: oligonucleotide substrate
ccccugucguguaggug

SEQ ID NO: 4196 - RNA, 17 nt, artificial sequence
  misc_feature: oligonucleotide substrate
ccugucguguagguguc

SEQ ID NO: 4197 - RNA, 17 nt, artificial sequence
  misc_feature: oligonucleotide substrate
ucguguagguguccccg

SEQ ID NO: 4198 - RNA, 17 nt, artificial sequence
  misc_feature: oligonucleotide substrate
guguagguguccccguc

SEQ ID NO: 4199 - RNA, 17 nt, artificial sequence
  misc_feature: oligonucleotide substrate
guguccccgucaacgcc

SEQ ID NO: 4200 - RNA, 17 nt, artificial sequence
  misc_feature: oligonucleotide substrate
ccccgucaacgccggca

SEQ ID NO: 4201 - RNA, 17 nt, artificial sequence
  misc_feature: oligonucleotide substrate
ccgucaacgccggcaaa

SEQ ID NO: 4202 - RNA, 17 nt, artificial sequence
  misc_feature: oligonucleotide substrate
caacgccggcaaagagu

SEQ ID NO: 4203 - RNA, 17 nt, artificial sequence
  misc_feature: oligonucleotide substrate
ggcaaagaguagcauca

SEQ ID NO: 4204 - RNA, 17 nt, artificial sequence
  misc_feature: oligonucleotide substrate
aaagaguagcaucacaa

SEQ ID NO: 4205 - RNA, 17 nt, artificial sequence
  misc_feature: oligonucleotide substrate
agaguagcaucacaauc

SEQ ID NO: 4206 - RNA, 17 nt, artificial sequence
  misc_feature: oligonucleotide substrate
guagcaucacaaucaac

SEQ ID NO: 4207 - RNA, 17 nt, artificial sequence
  misc_feature: oligonucleotide substrate
gcaucacaaucaacacc

SEQ ID NO: 4208 - RNA, 17 nt, artificial sequence
  misc_feature: oligonucleotide substrate
cacaaucaacaccuuag

SEQ ID NO: 4209 - RNA, 17 nt, artificial sequence
  misc_feature: oligonucleotide substrate
caaucaacaccuuagcc

SEQ ID NO: 4210 - RNA, 17 nt, artificial sequence
  misc_feature: oligonucleotide substrate
acaccuuagcccaguuc

SEQ ID NO: 4211 - RNA, 17 nt, artificial sequence
  misc_feature: oligonucleotide substrate
uuagcccaguuccccac

SEQ ID NO: 4212 - RNA, 17 nt, artificial sequence
  misc_feature: oligonucleotide substrate
aguuccccaccauggaa

SEQ ID NO: 4213 - RNA, 17 nt, artificial sequence
  misc_feature: oligonucleotide substrate
uccccaccauggaauaa

SEQ ID NO: 4214 - RNA, 17 nt, artificial sequence
  misc_feature: oligonucleotide substrate
accauggaauaauaggc

SEQ ID NO: 4215 - RNA, 17 nt, artificial sequence
  misc_feature: oligonucleotide substrate
auggaauaauaggcaag

SEQ ID NO: 4216 - RNA, 17 nt, artificial sequence
  misc_feature: oligonucleotide substrate
aauaauaggcaaggccc

SEQ ID NO: 4217 - RNA, 17 nt, artificial sequence
  misc_feature: oligonucleotide substrate
uaggcaaggcccgccag

SEQ ID NO: 4218 - RNA, 17 nt, artificial sequence
  misc_feature: oligonucleotide substrate
caaggcccgccaggacu

SEQ ID NO: 4219 - RNA, 17 nt, artificial sequence
  misc_feature: oligonucleotide substrate
ccgccaggacuccccag

SEQ ID NO: 4220 - RNA, 17 nt, artificial sequence
  misc_feature: oligonucleotide substrate
acuccccagugggcccc

SEQ ID NO: 4221 - RNA, 17 nt, artificial sequence
  misc_feature: oligonucleotide substrate
cccagugggcccccgcc

SEQ ID NO: 4222 - RNA, 17 nt, artificial sequence
  misc_feature: oligonucleotide substrate
gggcccccgccaccaug

SEQ ID NO: 4223 - RNA, 17 nt, artificial sequence
  misc_feature: oligonucleotide substrate
cccccgccaccaugucc

SEQ ID NO: 4224 - RNA, 17 nt, artificial sequence
  misc_feature: oligonucleotide substrate
ccgccaccauguccacg

SEQ ID NO: 4225 - RNA, 17 nt, artificial sequence
  misc_feature: oligonucleotide substrate
gccaccauguccacgac

SEQ ID NO: 4226 - RNA, 17 nt, artificial sequence
  misc_feature: oligonucleotide substrate
ccauguccacgacggcu

SEQ ID NO: 4227 - RNA, 17 nt, artificial sequence
  misc_feature: oligonucleotide substrate
uguccacgacggcuugu

SEQ ID NO: 4228 - RNA, 17 nt, artificial sequence
  misc_feature: oligonucleotide substrate
ccacgacggcuuguggg

SEQ ID NO: 4229 - RNA, 17 nt, artificial sequence
  misc_feature: oligonucleotide substrate
gacggcuugugggaucc

SEQ ID NO: 4230 - RNA, 17 nt, artificial sequence
  misc_feature: oligonucleotide substrate
cuugugggauccggagc

SEQ ID NO: 4231 - RNA, 17 nt, artificial sequence
  misc_feature: oligonucleotide substrate
gauccggagcaacugcg

SEQ ID NO: 4232 - RNA, 17 nt, artificial sequence
  misc_feature: oligonucleotide substrate
ccggagcaacugcgaua

SEQ ID NO: 4233 - RNA, 17 nt, artificial sequence
  misc_feature: oligonucleotide substrate
gagcaacugcgauacca

SEQ ID NO: 4234 - RNA, 17 nt, artificial sequence
  misc_feature: oligonucleotide substrate
caacugcgauaccacua

SEQ ID NO: 4235 - RNA, 17 nt, artificial sequence
  misc_feature: oligonucleotide substrate
acugcgauaccacuagg

SEQ ID NO: 4236 - RNA, 17 nt, artificial sequence
  misc_feature: oligonucleotide substrate
gcgauaccacuagggcu

SEQ ID NO: 4237 - RNA, 17 nt, artificial sequence
  misc_feature: oligonucleotide substrate
ccacuagggcuguugua

SEQ ID NO: 4238 - RNA, 17 nt, artificial sequence
  misc_feature: oligonucleotide substrate
cuagggcuguuguaggu

SEQ ID NO: 4239 - RNA, 17 nt, artificial sequence
  misc_feature: oligonucleotide substrate
gggcuguuguaggugac

SEQ ID NO: 4240 - RNA, 17 nt, artificial sequence
  misc_feature: oligonucleotide substrate
uguuguaggugaccaau

SEQ ID NO: 4241 - RNA, 17 nt, artificial sequence
  misc_feature: oligonucleotide substrate
uguaggugaccaauuca

SEQ ID NO: 4242 - RNA, 17 nt, artificial sequence
  misc_feature: oligonucleotide substrate
ggugaccaauucaucau

SEQ ID NO: 4243 - RNA, 17 nt, artificial sequence
  misc_feature: oligonucleotide substrate
accaauucaucaucaua

SEQ ID NO: 4244 - RNA, 17 nt, artificial sequence
  misc_feature: oligonucleotide substrate
aauucaucaucauaucc

SEQ ID NO: 4245 - RNA, 17 nt, artificial sequence
  misc_feature: oligonucleotide substrate
ucaucaucauaucccaa

SEQ ID NO: 4246 - RNA, 17 nt, artificial sequence
  misc_feature: oligonucleotide substrate
aucaucauaucccaagc

SEQ ID NO: 4247 - RNA, 17 nt, artificial sequence
  misc_feature: oligonucleotide substrate
uaucccaagccaugcga

SEQ ID NO: 4248 - RNA, 17 nt, artificial sequence
  misc_feature: oligonucleotide substrate
cccaagccaugcgaugg

SEQ ID NO: 4249 - RNA, 17 nt, artificial sequence
  misc_feature: oligonucleotide substrate
caagccaugcgauggcc

SEQ ID NO: 4250 - RNA, 17 nt, artificial sequence
  misc_feature: oligonucleotide substrate
gccaugcgauggccuga

SEQ ID NO: 4251 - RNA, 17 nt, artificial sequence
  misc_feature: oligonucleotide substrate
augcgauggccugauac

SEQ ID NO: 4252 - RNA, 17 nt, artificial sequence
  misc_feature: oligonucleotide substrate
auggccugauacguggc

SEQ ID NO: 4253 - RNA, 17 nt, artificial sequence
  misc_feature: oligonucleotide substrate
ggccugauacguggccg

SEQ ID NO: 4254 - RNA, 17 nt, artificial sequence
  misc_feature: oligonucleotide substrate
ccugauacguggccggg

SEQ ID NO: 4255 - RNA, 17 nt, artificial sequence
  misc_feature: oligonucleotide substrate
gauacguggccgggaua

SEQ ID NO: 4256 - RNA, 17 nt, artificial sequence
  misc_feature: oligonucleotide substrate
uggccgggauagaucga

SEQ ID NO: 4257 - RNA, 17 nt, artificial sequence
  misc_feature: oligonucleotide substrate
cgggauagaucgagcaa

SEQ ID NO: 4258 - RNA, 17 nt, artificial sequence
  misc_feature: oligonucleotide substrate
uagaucgagcaauuaca

SEQ ID NO: 4259 - RNA, 17 nt, artificial sequence
  misc_feature: oligonucleotide substrate
aucgagcaauuacaguc

SEQ ID NO: 4260 - RNA, 17 nt, artificial sequence
  misc_feature: oligonucleotide substrate
gagcaauuacaguccug

SEQ ID NO: 4261 - RNA, 17 nt, artificial sequence
  misc_feature: oligonucleotide substrate
caauuacaguccuguac

SEQ ID NO: 4262 - RNA, 17 nt, artificial sequence
  misc_feature: oligonucleotide substrate
acaguccuguacugucu

SEQ ID NO: 4263 - RNA, 17 nt, artificial sequence
  misc_feature: oligonucleotide substrate
aguccuguacugucuca

SEQ ID NO: 4264 - RNA, 17 nt, artificial sequence
  misc_feature: oligonucleotide substrate
ccuguacugucucauac

SEQ ID NO: 4265 - RNA, 17 nt, artificial sequence
  misc_feature: oligonucleotide substrate
acugucucauaccggcg

SEQ ID NO: 4266 - RNA, 17 nt, artificial sequence
  misc_feature: oligonucleotide substrate
ugucucauaccggcgag

SEQ ID NO: 4267 - RNA, 17 nt, artificial sequence
  misc_feature: oligonucleotide substrate
ucauaccggcgaggcga

SEQ ID NO: 4268 - RNA, 17 nt, artificial sequence
  misc_feature: oligonucleotide substrate
ccggcgaggcgagaagg

SEQ ID NO: 4269 - RNA, 17 nt, artificial sequence
  misc_feature: oligonucleotide substrate
gcgagaaggugaacagc

SEQ ID NO: 4270 - RNA, 17 nt, artificial sequence
  misc_feature: oligonucleotide substrate
gaaggugaacagcugag

SEQ ID NO: 4271 - RNA, 17 nt, artificial sequence
  misc_feature: oligonucleotide substrate
ggugaacagcugagaga

SEQ ID NO: 4272 - RNA, 17 nt, artificial sequence
  misc_feature: oligonucleotide substrate
gcugagagacgaggaag

SEQ ID NO: 4273 - RNA, 17 nt, artificial sequence
  misc_feature: oligonucleotide substrate
cgaggaagacagauccg

SEQ ID NO: 4274 - RNA, 17 nt, artificial sequence
  misc_feature: oligonucleotide substrate
gaagacagauccgcaga

SEQ ID NO: 4275 - RNA, 17 nt, artificial sequence
  misc_feature: oligonucleotide substrate
acagauccgcagagauc

SEQ ID NO: 4276 - RNA, 17 nt, artificial sequence
  misc_feature: oligonucleotide substrate
ccgcagagaucccccac

SEQ ID NO: 4277 - RNA, 17 nt, artificial sequence
  misc_feature: oligonucleotide substrate
gaucccccacguacaua

SEQ ID NO: 4278 - RNA, 17 nt, artificial sequence
  misc_feature: oligonucleotide substrate
ucccccacguacauagc

SEQ ID NO: 4279 - RNA, 17 nt, artificial sequence
  misc_feature: oligonucleotide substrate
ccccacguacauagcag

SEQ ID NO: 4280 - RNA, 17 nt, artificial sequence
  misc_feature: oligonucleotide substrate
ccacguacauagcagag

SEQ ID NO: 4281 - RNA, 17 nt, artificial sequence
  misc_feature: oligonucleotide substrate
cguacauagcagagcag

SEQ ID NO: 4282 - RNA, 17 nt, artificial sequence
  misc_feature: oligonucleotide substrate
auagcagagcagaaagc

SEQ ID NO: 4283 - RNA, 17 nt, artificial sequence
  misc_feature: oligonucleotide substrate
agcagaaagcagccgcc

SEQ ID NO: 4284 - RNA, 17 nt, artificial sequence
  misc_feature: oligonucleotide substrate
agaaagcagccgcccca

SEQ ID NO: 4285 - RNA, 17 nt, artificial sequence
  misc_feature: oligonucleotide substrate
aagcagccgccccaacg

SEQ ID NO: 4286 - RNA, 17 nt, artificial sequence
  misc_feature: oligonucleotide substrate
ccgccccaacgagcaaa

SEQ ID NO: 4287 - RNA, 17 nt, artificial sequence
  misc_feature: oligonucleotide substrate
cccaacgagcaaaucga

SEQ ID NO: 4288 - RNA, 17 nt, artificial sequence
  misc_feature: oligonucleotide substrate
acgagcaaaucgacgug

SEQ ID NO: 4289 - RNA, 17 nt, artificial sequence
  misc_feature: oligonucleotide substrate
gcaaaucgacgugacgc

SEQ ID NO: 4290 - RNA, 17 nt, artificial sequence
  misc_feature: oligonucleotide substrate
aaaucgacgugacgccg

SEQ ID NO: 4291 - RNA, 17 nt, artificial sequence
  misc_feature: oligonucleotide substrate
ucgacgugacgccguau

SEQ ID NO: 4292 - RNA, 17 nt, artificial sequence
  misc_feature: oligonucleotide substrate
gacgugacgccguaucg

SEQ ID NO: 4293 - RNA, 17 nt, artificial sequence
  misc_feature: oligonucleotide substrate
gugacgccguaucgucg

SEQ ID NO: 4294 - RNA, 17 nt, artificial sequence
  misc_feature: oligonucleotide substrate
gacgccguaucgucgua

SEQ ID NO: 4295 - RNA, 17 nt, artificial sequence
  misc_feature: oligonucleotide substrate
gccguaucgucguagug

SEQ ID NO: 4296 - RNA, 17 nt, artificial sequence
  misc_feature: oligonucleotide substrate
guaucgucguagugggg

SEQ ID NO: 4297 - RNA, 17 nt, artificial sequence
  misc_feature: oligonucleotide substrate
ucgucguaguggggaug

SEQ ID NO: 4298 - RNA, 17 nt, artificial sequence
  misc_feature: oligonucleotide substrate
uaguggggaugcuggca

SEQ ID NO: 4299 - RNA, 17 nt, artificial sequence
  misc_feature: oligonucleotide substrate
guggggaugcuggcauu

SEQ ID NO: 4300 - RNA, 17 nt, artificial sequence
  misc_feature: oligonucleotide substrate
ggaugcuggcauuccug

SEQ ID NO: 4301 - RNA, 17 nt, artificial sequence
  misc_feature: oligonucleotide substrate
augcuggcauuccuggc

SEQ ID NO: 4302 - RNA, 17 nt, artificial sequence
  misc_feature: oligonucleotide substrate
cauuccuggccgcgagc

SEQ ID NO: 4303 - RNA, 17 nt, artificial sequence
  misc_feature: oligonucleotide substrate
uccuggccgcgagcgug

SEQ ID NO: 4304 - RNA, 17 nt, artificial sequence
  misc_feature: oligonucleotide substrate
ggccgcgagcgugggag

SEQ ID NO: 4305 - RNA, 17 nt, artificial sequence
  misc_feature: oligonucleotide substrate
ccgcgagcgugggagug

SEQ ID NO: 4306 - RNA, 17 nt, artificial sequence
  misc_feature: oligonucleotide substrate
gcgugggagugagcgcu

SEQ ID NO: 4307 - RNA, 17 nt, artificial sequence
  misc_feature: oligonucleotide substrate
gggagugagcgcuaccc

SEQ ID NO: 4308 - RNA, 17 nt, artificial sequence
  misc_feature: oligonucleotide substrate
gagugagcgcuacccag

SEQ ID NO: 4309 - RNA, 17 nt, artificial sequence
  misc_feature: oligonucleotide substrate
ugagcgcuacccagcag

SEQ ID NO: 4310 - RNA, 17 nt, artificial sequence
  misc_feature: oligonucleotide substrate
gcuacccagcagcggga

SEQ ID NO: 4311 - RNA, 17 nt, artificial sequence
  misc_feature: oligonucleotide substrate
acccagcagcgggagga

SEQ ID NO: 4312 - RNA, 17 nt, artificial sequence
  misc_feature: oligonucleotide substrate
cgggaggaguuguucuc

SEQ ID NO: 4313 - RNA, 17 nt, artificial sequence
  misc_feature: oligonucleotide substrate
gaggaguuguucucccg

SEQ ID NO: 4314 - RNA, 17 nt, artificial sequence
  misc_feature: oligonucleotide substrate
ucucccgaacgcagggc

SEQ ID NO: 4315 - RNA, 17 nt, artificial sequence
  misc_feature: oligonucleotide substrate
ucccgaacgcagggcac

SEQ ID NO: 4316 - RNA, 17 nt, artificial sequence
  misc_feature: oligonucleotide substrate
aacgcagggcacgcacc

SEQ ID NO: 4317 - RNA, 17 nt, artificial sequence
  misc_feature: oligonucleotide substrate
cgcagggcacgcacccc

SEQ ID NO: 4318 - RNA, 17 nt, artificial sequence
  misc_feature: oligonucleotide substrate
cagggcacgcaccccgg

SEQ ID NO: 4319 - RNA, 17 nt, artificial sequence
  misc_feature: oligonucleotide substrate
gggcacgcaccccgggg

SEQ ID NO: 4320 - RNA, 17 nt, artificial sequence
  misc_feature: oligonucleotide substrate
accccggggugugcaug

SEQ ID NO: 4321 - RNA, 17 nt, artificial sequence
  misc_feature: oligonucleotide substrate
cccggggugugcaugau

SEQ ID NO: 4322 - RNA, 17 nt, artificial sequence
  misc_feature: oligonucleotide substrate
cggggugugcaugauca

SEQ ID NO: 4323 - RNA, 17 nt, artificial sequence
  misc_feature: oligonucleotide substrate
gggugugcaugaucaug

SEQ ID NO: 4324 - RNA, 17 nt, artificial sequence
  misc_feature: oligonucleotide substrate
ugugcaugaucaugucc

SEQ ID NO: 4325 - RNA, 17 nt, artificial sequence
  misc_feature: oligonucleotide substrate
gcaugaucauguccucu

SEQ ID NO: 4326 - RNA, 17 nt, artificial sequence
  misc_feature: oligonucleotide substrate
augaucauguccucugc

SEQ ID NO: 4327 - RNA, 17 nt, artificial sequence
  misc_feature: oligonucleotide substrate
uguccucugccucauac

SEQ ID NO: 4328 - RNA, 17 nt, artificial sequence
  misc_feature: oligonucleotide substrate
ucugccucauacacaau

SEQ ID NO: 4329 - RNA, 17 nt, artificial sequence
  misc_feature: oligonucleotide substrate
ugccucauacacaaugc

SEQ ID NO: 4330 - RNA, 17 nt, artificial sequence
  misc_feature: oligonucleotide substrate
ccucauacacaaugcuu

SEQ ID NO: 4331 - RNA, 17 nt, artificial sequence
  misc_feature: oligonucleotide substrate
cauacacaaugcuugag

SEQ ID NO: 4332 - RNA, 17 nt, artificial sequence
  misc_feature: oligonucleotide substrate
uacacaaugcuugaguu

SEQ ID NO: 4333 - RNA, 17 nt, artificial sequence
  misc_feature: oligonucleotide substrate
augcuugaguuggagca

SEQ ID NO: 4334 - RNA, 17 nt, artificial sequence
  misc_feature: oligonucleotide substrate
gaguuggagcaaucguu

SEQ ID NO: 4335 - RNA, 17 nt, artificial sequence
  misc_feature: oligonucleotide substrate
uuggagcaaucguucgu

SEQ ID NO: 4336 - RNA, 17 nt, artificial sequence
  misc_feature: oligonucleotide substrate
gagcaaucguucgugac

SEQ ID NO: 4337 - RNA, 17 nt, artificial sequence
  misc_feature: oligonucleotide substrate
aaucguucgugacaugg

SEQ ID NO: 4338 - RNA, 17 nt, artificial sequence
  misc_feature: oligonucleotide substrate
cguucgugacaugguac

SEQ ID NO: 4339 - RNA, 17 nt, artificial sequence
  misc_feature: oligonucleotide substrate
uucgugacaugguacag

SEQ ID NO: 4340 - RNA, 17 nt, artificial sequence
  misc_feature: oligonucleotide substrate
gugacaugguacagccc

SEQ ID NO: 4341 - RNA, 17 nt, artificial sequence
  misc_feature: oligonucleotide substrate
gacaugguacagcccgg

SEQ ID NO: 4342 - RNA, 17 nt, artificial sequence
  misc_feature: oligonucleotide substrate
augguacagcccggacg

SEQ ID NO: 4343 - RNA, 17 nt, artificial sequence
  misc_feature: oligonucleotide substrate
cagcccggacgcguugc

SEQ ID NO: 4344 - RNA, 17 nt, artificial sequence
  misc_feature: oligonucleotide substrate
gcccggacgcguugcac

SEQ ID NO: 4345 - RNA, 17 nt, artificial sequence
  misc_feature: oligonucleotide substrate
ccggacgcguugcacac

SEQ ID NO: 4346 - RNA, 17 nt, artificial sequence
  misc_feature: oligonucleotide substrate
gacgcguugcacaccuc

SEQ ID NO: 4347 - RNA, 17 nt, artificial sequence
  misc_feature: oligonucleotide substrate
cgcguugcacaccucau

SEQ ID NO: 4348 - RNA, 17 nt, artificial sequence
  misc_feature: oligonucleotide substrate
cguugcacaccucauaa

SEQ ID NO: 4349 - RNA, 17 nt, artificial sequence
  misc_feature: oligonucleotide substrate
cacaccucauaagcgga

SEQ ID NO: 4350 - RNA, 17 nt, artificial sequence
  misc_feature: oligonucleotide substrate
ccucauaagcggaggcu

SEQ ID NO: 4351 - RNA, 17 nt, artificial sequence
  misc_feature: oligonucleotide substrate
aagcggaggcugggaug

SEQ ID NO: 4352 - RNA, 17 nt, artificial sequence
  misc_feature: oligonucleotide substrate
aggcugggauggucaga

SEQ ID NO: 4353 - RNA, 17 nt, artificial sequence
  misc_feature: oligonucleotide substrate
cugggauggucagacag

SEQ ID NO: 4354 - RNA, 17 nt, artificial sequence
  misc_feature: oligonucleotide substrate
auggucagacagggcag

SEQ ID NO: 4355 - RNA, 17 nt, artificial sequence
  misc_feature: oligonucleotide substrate
cagacagggcagcagag

SEQ ID NO: 4356 - RNA, 17 nt, artificial sequence
  misc_feature: oligonucleotide substrate
acagggcagcagagcca

SEQ ID NO: 4357 - RNA, 17 nt, artificial sequence
  misc_feature: oligonucleotide substrate
gcagcagagccaagagg

SEQ ID NO: 4358 - RNA, 17 nt, artificial sequence
  misc_feature: oligonucleotide substrate
agaggaagauagagaaa

SEQ ID NO: 4359 - RNA, 17 nt, artificial sequence
  misc_feature: oligonucleotide substrate
gagaaagagcaaccggg

SEQ ID NO: 4360 - RNA, 17 nt, artificial sequence
  misc_feature: oligonucleotide substrate
aaagagcaaccgggcag

SEQ ID NO: 4361 - RNA, 17 nt, artificial sequence
  misc_feature: oligonucleotide substrate
gcaaccgggcagauucc

SEQ ID NO: 4362 - RNA, 17 nt, artificial sequence
  misc_feature: oligonucleotide substrate
ccgggcagauucccugu

SEQ ID NO: 4363 - RNA, 17 nt, artificial sequence
  misc_feature: oligonucleotide substrate
gauucccuguugcauag

SEQ ID NO: 4364 - RNA, 17 nt, artificial sequence
  misc_feature: oligonucleotide substrate
ucccuguugcauaguuc

SEQ ID NO: 4365 - RNA, 17 nt, artificial sequence
  misc_feature: oligonucleotide substrate
ccuguugcauaguucac

SEQ ID NO: 4366 - RNA, 17 nt, artificial sequence
  misc_feature: oligonucleotide substrate
guugcauaguucacgcc

SEQ ID NO: 4367 - RNA, 17 nt, artificial sequence
  misc_feature: oligonucleotide substrate
cauaguucacgccgucu

SEQ ID NO: 4368 - RNA, 17 nt, artificial sequence
  misc_feature: oligonucleotide substrate
uaguucacgccgucuuc

SEQ ID NO: 4369 - RNA, 17 nt, artificial sequence
  misc_feature: oligonucleotide substrate
uucacgccgucuuccag

SEQ ID NO: 4370 - RNA, 17 nt, artificial sequence
  misc_feature: oligonucleotide substrate
cuuccagaacccggacg

SEQ ID NO: 4371 - RNA, 17 nt, artificial sequence
  misc_feature: oligonucleotide substrate
gaacccggacgccaugc

SEQ ID NO: 4372 - RNA, 17 nt, artificial sequence
  misc_feature: oligonucleotide substrate
acccggacgccaugcgc

SEQ ID NO: 4373 - RNA, 17 nt, artificial sequence
  misc_feature: oligonucleotide substrate
cggacgccaugcgccag

SEQ ID NO: 4374 - RNA, 17 nt, artificial sequence
  misc_feature: oligonucleotide substrate
gacgccaugcgccaggg

SEQ ID NO: 4375 - RNA, 17 nt, artificial sequence
  misc_feature: oligonucleotide substrate
cgccaugcgccagggcc

SEQ ID NO: 4376 - RNA, 17 nt, artificial sequence
  misc_feature: oligonucleotide substrate
gcgccagggcccuggca

SEQ ID NO: 4377 - RNA, 17 nt, artificial sequence
  misc_feature: oligonucleotide substrate
gggcccuggcagugccu

SEQ ID NO: 4378 - RNA, 17 nt, artificial sequence
  misc_feature: oligonucleotide substrate
cccuggcagugccuccc

SEQ ID NO: 4379 - RNA, 17 nt, artificial sequence
  misc_feature: oligonucleotide substrate
cuggcagugccucccaa

SEQ ID NO: 4380 - RNA, 17 nt, artificial sequence
  misc_feature: oligonucleotide substrate
ccaagggggcgccgacg

SEQ ID NO: 4381 - RNA, 17 nt, artificial sequence
  misc_feature: oligonucleotide substrate
aagggggcgccgacgag

SEQ ID NO: 4382 - RNA, 17 nt, artificial sequence
  misc_feature: oligonucleotide substrate
gggcgccgacgagcgga

SEQ ID NO: 4383 - RNA, 17 nt, artificial sequence
  misc_feature: oligonucleotide substrate
gccgacgagcggaaugu

SEQ ID NO: 4384 - RNA, 17 nt, artificial sequence
  misc_feature: oligonucleotide substrate
cgagcggaauguacccc

SEQ ID NO: 4385 - RNA, 17 nt, artificial sequence
  misc_feature: oligonucleotide substrate
agcggaauguaccccau

SEQ ID NO: 4386 - RNA, 17 nt, artificial sequence
  misc_feature: oligonucleotide substrate
cggaauguaccccauga

SEQ ID NO: 4387 - RNA, 17 nt, artificial sequence
  misc_feature: oligonucleotide substrate
uguaccccaugaggucg

SEQ ID NO: 4388 - RNA, 17 nt, artificial sequence
  misc_feature: oligonucleotide substrate
cccaugaggucggcgaa

SEQ ID NO: 4389 - RNA, 17 nt, artificial sequence
  misc_feature: oligonucleotide substrate
ugaggucggcgaagccg

SEQ ID NO: 4390 - RNA, 17 nt, artificial sequence
  misc_feature: oligonucleotide substrate
ucggcgaagccgcaugu

SEQ ID NO: 4391 - RNA, 17 nt, artificial sequence
  misc_feature: oligonucleotide substrate
gcgaagccgcaugugag

SEQ ID NO: 4392 - RNA, 17 nt, artificial sequence
  misc_feature: oligonucleotide substrate
gaagccgcaugugaggg

SEQ ID NO: 4393 - RNA, 17 nt, artificial sequence
  misc_feature: oligonucleotide substrate
agccgcaugugagggua

SEQ ID NO: 4394 - RNA, 17 nt, artificial sequence
  misc_feature: oligonucleotide substrate
augugaggguaucgaug

SEQ ID NO: 4395 - RNA, 17 nt, artificial sequence
  misc_feature: oligonucleotide substrate
gugaggguaucgaugac

SEQ ID NO: 4396 - RNA, 17 nt, artificial sequence
  misc_feature: oligonucleotide substrate
ggguaucgaugaccuua

SEQ ID NO: 4397 - RNA, 17 nt, artificial sequence
  misc_feature: oligonucleotide substrate
uaucgaugaccuuaccc

SEQ ID NO: 4398 - RNA, 17 nt, artificial sequence
  misc_feature: oligonucleotide substrate
augaccuuacccaaguu

SEQ ID NO: 4399 - RNA, 17 nt, artificial sequence
  misc_feature: oligonucleotide substrate
uuacccaaguuacgcga

SEQ ID NO: 4400 - RNA, 17 nt, artificial sequence
  misc_feature: oligonucleotide substrate
cccaaguuacgcgaccu

SEQ ID NO: 4401 - RNA, 17 nt, artificial sequence
  misc_feature: oligonucleotide substrate
caaguuacgcgaccuac

SEQ ID NO: 4402 - RNA, 17 nt, artificial sequence
  misc_feature: oligonucleotide substrate
guuacgcgaccuacgcc

SEQ ID NO: 4403 - RNA, 17 nt, artificial sequence
  misc_feature: oligonucleotide substrate
cgcgaccuacgccgggg

SEQ ID NO: 4404 - RNA, 17 nt, artificial sequence
  misc_feature: oligonucleotide substrate
cgaccuacgccgggggu

SEQ ID NO: 4405 - RNA, 17 nt, artificial sequence
  misc_feature: oligonucleotide substrate
cgccggggguccguggg

SEQ ID NO: 4406 - RNA, 17 nt, artificial sequence
  misc_feature: oligonucleotide substrate
ggggguccguggggccc

SEQ ID NO: 4407 - RNA, 17 nt, artificial sequence
  misc_feature: oligonucleotide substrate
uccguggggccccaacu

SEQ ID NO: 4408 - RNA, 17 nt, artificial sequence
  misc_feature: oligonucleotide substrate
gggccccaacuaggccg

SEQ ID NO: 4409 - RNA, 17 nt, artificial sequence
  misc_feature: oligonucleotide substrate
ccaacuaggccgggagc

SEQ ID NO: 4410 - RNA, 17 nt, artificial sequence
  misc_feature: oligonucleotide substrate
ggccgggagccgcgggg

SEQ ID NO: 4411 - RNA, 17 nt, artificial sequence
  misc_feature: oligonucleotide substrate
cgggagccgcgggguga

SEQ ID NO: 4412 - RNA, 17 nt, artificial sequence
  misc_feature: oligonucleotide substrate
gccgcggggugacagga

SEQ ID NO: 4413 - RNA, 17 nt, artificial sequence
  misc_feature: oligonucleotide substrate
gcggggugacaggagcc

SEQ ID NO: 4414 - RNA, 17 nt, artificial sequence
  misc_feature: oligonucleotide substrate
ugacaggagccauccug

SEQ ID NO: 4415 - RNA, 17 nt, artificial sequence
  misc_feature: oligonucleotide substrate
caggagccauccugccc

SEQ ID NO: 4416 - RNA, 17 nt, artificial sequence
  misc_feature: oligonucleotide substrate
gccauccugcccacccu

SEQ ID NO: 4417 - RNA, 17 nt, artificial sequence
  misc_feature: oligonucleotide substrate
uccugcccacccuaagc

SEQ ID NO: 4418 - RNA, 17 nt, artificial sequence
  misc_feature: oligonucleotide substrate
cacccuaagcccucauu

SEQ ID NO: 4419 - RNA, 17 nt, artificial sequence
  misc_feature: oligonucleotide substrate
aagcccucauugccaua

SEQ ID NO: 4420 - RNA, 17 nt, artificial sequence
  misc_feature: oligonucleotide substrate
cccucauugccauagag

SEQ ID NO: 4421 - RNA, 17 nt, artificial sequence
  misc_feature: oligonucleotide substrate
ucauugccauagagggg

SEQ ID NO: 4422 - RNA, 17 nt, artificial sequence
  misc_feature: oligonucleotide substrate
auagaggggccaagggu

SEQ ID NO: 4423 - RNA, 17 nt, artificial sequence
  misc_feature: oligonucleotide substrate
ggccaaggguacccggg

SEQ ID NO: 4424 - RNA, 17 nt, artificial sequence
  misc_feature: oligonucleotide substrate
ccaaggguacccgggcu

SEQ ID NO: 4425 - RNA, 17 nt, artificial sequence
  misc_feature: oligonucleotide substrate
guacccgggcugagccc

SEQ ID NO: 4426 - RNA, 17 nt, artificial sequence
  misc_feature: oligonucleotide substrate
cgggcugagcccaggcc

SEQ ID NO: 4427 - RNA, 17 nt, artificial sequence
  misc_feature: oligonucleotide substrate
gagcccaggcccugccc

SEQ ID NO: 4428 - RNA, 17 nt, artificial sequence
  misc_feature: oligonucleotide substrate
caggcccugcccucggg

SEQ ID NO: 4429 - RNA, 17 nt, artificial sequence
  misc_feature: oligonucleotide substrate
gcccucgggccggcgag

SEQ ID NO: 4430 - RNA, 17 nt, artificial sequence
  misc_feature: oligonucleotide substrate
ucgggccggcgagccuu

SEQ ID NO: 4431 - RNA, 17 nt, artificial sequence
  misc_feature: oligonucleotide substrate
gccggcgagccuugggg

SEQ ID NO: 4432 - RNA, 17 nt, artificial sequence
  misc_feature: oligonucleotide substrate
ccuuggggauagguugu

SEQ ID NO: 4433 - RNA, 17 nt, artificial sequence
  misc_feature: oligonucleotide substrate
ggggauagguugucgcc

SEQ ID NO: 4434 - RNA, 17 nt, artificial sequence
  misc_feature: oligonucleotide substrate
gauagguugucgccuuc

SEQ ID NO: 4435 - RNA, 17 nt, artificial sequence
  misc_feature: oligonucleotide substrate
agguugucgccuuccac

SEQ ID NO: 4436 - RNA, 17 nt, artificial sequence
  misc_feature: oligonucleotide substrate
cgccuuccacgagguug

SEQ ID NO: 4437 - RNA, 17 nt, artificial sequence
  misc_feature: oligonucleotide substrate
uccacgagguugcgacc

SEQ ID NO: 4438 - RNA, 17 nt, artificial sequence
  misc_feature: oligonucleotide substrate
acgagguugcgaccgcu

SEQ ID NO: 4439 - RNA, 17 nt, artificial sequence
  misc_feature: oligonucleotide substrate
agguugcgaccgcucgg

SEQ ID NO: 4440 - RNA, 17 nt, artificial sequence
  misc_feature: oligonucleotide substrate
uugcgaccgcucggaag

SEQ ID NO: 4441 - RNA, 17 nt, artificial sequence
  misc_feature: oligonucleotide substrate
gcucggaagucuuccua

SEQ ID NO: 4442 - RNA, 17 nt, artificial sequence
  misc_feature: oligonucleotide substrate
ucuuccuagucgcgcgc

SEQ ID NO: 4443 - RNA, 17 nt, artificial sequence
  misc_feature: oligonucleotide substrate
uccuagucgcgcgcaca

SEQ ID NO: 4444 - RNA, 17 nt, artificial sequence
  misc_feature: oligonucleotide substrate
cuagucgcgcgcacacc

SEQ ID NO: 4445 - RNA, 17 nt, artificial sequence
  misc_feature: oligonucleotide substrate
agucgcgcgcacaccca

SEQ ID NO: 4446 - RNA, 17 nt, artificial sequence
  misc_feature: oligonucleotide substrate
ucgcgcgcacacccaac

SEQ ID NO: 4447 - RNA, 17 nt, artificial sequence
  misc_feature: oligonucleotide substrate
gcgcgcacacccaaccu

SEQ ID NO: 4448 - RNA, 17 nt, artificial sequence
  misc_feature: oligonucleotide substrate
cacacccaaccuggggc

SEQ ID NO: 4449 - RNA, 17 nt, artificial sequence
  misc_feature: oligonucleotide substrate
aaccuggggccccugcg

SEQ ID NO: 4450 - RNA, 17 nt, artificial sequence
  misc_feature: oligonucleotide substrate
gggccccugcgcggcaa

SEQ ID NO: 4451 - RNA, 17 nt, artificial sequence
  misc_feature: oligonucleotide substrate
gccccugcgcggcaaca

SEQ ID NO: 4452 - RNA, 17 nt, artificial sequence
  misc_feature: oligonucleotide substrate
ccugcgcggcaacaggu

SEQ ID NO: 4453 - RNA, 17 nt, artificial sequence
  misc_feature: oligonucleotide substrate
gcgcggcaacagguaaa

SEQ ID NO: 4454 - RNA, 17 nt, artificial sequence
  misc_feature: oligonucleotide substrate
ggcaacagguaaacucc

SEQ ID NO: 4455 - RNA, 17 nt, artificial sequence
  misc_feature: oligonucleotide substrate
acagguaaacuccacca

SEQ ID NO: 4456 - RNA, 17 nt, artificial sequence
  misc_feature: oligonucleotide substrate
uaaacuccaccaacgau

SEQ ID NO: 4457 - RNA, 17 nt, artificial sequence
  misc_feature: oligonucleotide substrate
cuccaccaacgaucuga

SEQ ID NO: 4458 - RNA, 17 nt, artificial sequence
  misc_feature: oligonucleotide substrate
caccaacgaucugacca

SEQ ID NO: 4459 - RNA, 17 nt, artificial sequence
  misc_feature: oligonucleotide substrate
acgaucugaccaccgcc

SEQ ID NO: 4460 - RNA, 17 nt, artificial sequence
  misc_feature: oligonucleotide substrate
aucugaccaccgcccgg

SEQ ID NO: 4461 - RNA, 17 nt, artificial sequence
  misc_feature: oligonucleotide substrate
ugaccaccgcccgggaa

SEQ ID NO: 4462 - RNA, 17 nt, artificial sequence
  misc_feature: oligonucleotide substrate
gcccgggaacuugacgu

SEQ ID NO: 4463 - RNA, 17 nt, artificial sequence
  misc_feature: oligonucleotide substrate
ggaacuugacguccugu

SEQ ID NO: 4464 - RNA, 17 nt, artificial sequence
  misc_feature: oligonucleotide substrate
aacuugacguccugugg

SEQ ID NO: 4465 - RNA, 17 nt, artificial sequence
  misc_feature: oligonucleotide substrate
gacguccugugggcggc

SEQ ID NO: 4466 - RNA, 17 nt, artificial sequence
  misc_feature: oligonucleotide substrate
uccugugggcggcgguu

SEQ ID NO: 4467 - RNA, 17 nt, artificial sequence
  misc_feature: oligonucleotide substrate
ugugggcggcgguuggu

SEQ ID NO: 4468 - RNA, 17 nt, artificial sequence
  misc_feature: oligonucleotide substrate
gggcggcgguugguguu

SEQ ID NO: 4469 - RNA, 17 nt, artificial sequence
  misc_feature: oligonucleotide substrate
ggcgguugguguuacgu

SEQ ID NO: 4470 - RNA, 17 nt, artificial sequence
  misc_feature: oligonucleotide substrate
cgguugguguuacguuu

SEQ ID NO: 4471 - RNA, 17 nt, artificial sequence
  misc_feature: oligonucleotide substrate
uugguguuacguuuggu

SEQ ID NO: 4472 - RNA, 17 nt, artificial sequence
  misc_feature: oligonucleotide substrate
gguguuacguuugguuu

SEQ ID NO: 4473 - RNA, 17 nt, artificial sequence
  misc_feature: oligonucleotide substrate
uacguuugguuuuucuu

SEQ ID NO: 4474 - RNA, 17 nt, artificial sequence
  misc_feature: oligonucleotide substrate
ucuuugagguuuaggau

SEQ ID NO: 4475 - RNA, 17 nt, artificial sequence
  misc_feature: oligonucleotide substrate
gguuuaggauucgugcu

SEQ ID NO: 4476 - RNA, 17 nt, artificial sequence
  misc_feature: oligonucleotide substrate
uaggauucgugcucaug

SEQ ID NO: 4477 - RNA, 17 nt, artificial sequence
  misc_feature: oligonucleotide substrate
ggauucgugcucauggu

SEQ ID NO: 4478 - RNA, 17 nt, artificial sequence
  misc_feature: oligonucleotide substrate
ucgugcucauggugcac

SEQ ID NO: 4479 - RNA, 17 nt, artificial sequence
  misc_feature: oligonucleotide substrate
ugcucauggugcacggu

SEQ ID NO: 4480 - RNA, 17 nt, artificial sequence
  misc_feature: oligonucleotide substrate
cucauggugcacggucu

SEQ ID NO: 4481 - RNA, 17 nt, artificial sequence
  misc_feature: oligonucleotide substrate
cauggugcacggucuac

SEQ ID NO: 4482 - RNA, 17 nt, artificial sequence
  misc_feature: oligonucleotide substrate
ggugcacggucuacgag

SEQ ID NO: 4483 - RNA, 17 nt, artificial sequence
  misc_feature: oligonucleotide substrate
cacggucuacgagaccu

SEQ ID NO: 4484 - RNA, 17 nt, artificial sequence
  misc_feature: oligonucleotide substrate
ucuacgagaccucccgg

SEQ ID NO: 4485 - RNA, 17 nt, artificial sequence
  misc_feature: oligonucleotide substrate
cucccggggcacucgca

SEQ ID NO: 4486 - RNA, 17 nt, artificial sequence
  misc_feature: oligonucleotide substrate
cccggggcacucgcaag

SEQ ID NO: 4487 - RNA, 17 nt, artificial sequence
  misc_feature: oligonucleotide substrate
gggcacucgcaagcacc

SEQ ID NO: 4488 - RNA, 17 nt, artificial sequence
  misc_feature: oligonucleotide substrate
acucgcaagcacccuau

SEQ ID NO: 4489 - RNA, 17 nt, artificial sequence
  misc_feature: oligonucleotide substrate
ucgcaagcacccuauca

SEQ ID NO: 4490 - RNA, 17 nt, artificial sequence
  misc_feature: oligonucleotide substrate
agcacccuaucaggcag

SEQ ID NO: 4491 - RNA, 17 nt, artificial sequence
  misc_feature: oligonucleotide substrate
ccuaucaggcaguacca

SEQ ID NO: 4492 - RNA, 17 nt, artificial sequence
  misc_feature: oligonucleotide substrate
aucaggcaguaccacaa

SEQ ID NO: 4493 - RNA, 17 nt, artificial sequence
  misc_feature: oligonucleotide substrate
caggcaguaccacaagg

SEQ ID NO: 4494 - RNA, 17 nt, artificial sequence
  misc_feature: oligonucleotide substrate
gcaguaccacaaggccu

SEQ ID NO: 4495 - RNA, 17 nt, artificial sequence
  misc_feature: oligonucleotide substrate
accacaaggccuuucgc

SEQ ID NO: 4496 - RNA, 17 nt, artificial sequence
  misc_feature: oligonucleotide substrate
ggccuuucgcgacccaa

SEQ ID NO: 4497 - RNA, 17 nt, artificial sequence
  misc_feature: oligonucleotide substrate
cuuucgcgacccaacac

SEQ ID NO: 4498 - RNA, 17 nt, artificial sequence
  misc_feature: oligonucleotide substrate
gcgacccaacacuacuc

SEQ ID NO: 4499 - RNA, 17 nt, artificial sequence
  misc_feature: oligonucleotide substrate
gacccaacacuacucgg

SEQ ID NO: 4500 - RNA, 17 nt, artificial sequence
  misc_feature: oligonucleotide substrate
ccaacacuacucggcua

SEQ ID NO: 4501 - RNA, 17 nt, artificial sequence
  misc_feature: oligonucleotide substrate
acuacucggcuagcagu

SEQ ID NO: 4502 - RNA, 17 nt, artificial sequence
  misc_feature: oligonucleotide substrate
cucggcuagcagucucg

SEQ ID NO: 4503 - RNA, 17 nt, artificial sequence
  misc_feature: oligonucleotide substrate
ggcuagcagucucgcgg

SEQ ID NO: 4504 - RNA, 17 nt, artificial sequence
  misc_feature: oligonucleotide substrate
gcagucucgcgggggca

SEQ ID NO: 4505 - RNA, 17 nt, artificial sequence
  misc_feature: oligonucleotide substrate
ucgcgggggcacgccca

SEQ ID NO: 4506 - RNA, 17 nt, artificial sequence
  misc_feature: oligonucleotide substrate
gcgggggcacgcccaaa

SEQ ID NO: 4507 - RNA, 17 nt, artificial sequence
  misc_feature: oligonucleotide substrate
gggggcacgcccaaauc

SEQ ID NO: 4508 - RNA, 17 nt, artificial sequence
  misc_feature: oligonucleotide substrate
acgcccaaaucuccagg

SEQ ID NO: 4509 - RNA, 17 nt, artificial sequence
  misc_feature: oligonucleotide substrate
aucuccaggcauugagc

SEQ ID NO: 4510 - RNA, 17 nt, artificial sequence
  misc_feature: oligonucleotide substrate
cuccaggcauugagcgg

SEQ ID NO: 4511 - RNA, 17 nt, artificial sequence
  misc_feature: oligonucleotide substrate
ggcauugagcggguuga

SEQ ID NO: 4512 - RNA, 17 nt, artificial sequence
  misc_feature: oligonucleotide substrate
uugagcggguugaucca

SEQ ID NO: 4513 - RNA, 17 nt, artificial sequence
  misc_feature: oligonucleotide substrate
gcggguugauccaagaa

SEQ ID NO: 4514 - RNA, 17 nt, artificial sequence
  misc_feature: oligonucleotide substrate
aagaaaggacccggucg

SEQ ID NO: 4515 - RNA, 17 nt, artificial sequence
  misc_feature: oligonucleotide substrate
aggacccggucguccug

SEQ ID NO: 4516 - RNA, 17 nt, artificial sequence
  misc_feature: oligonucleotide substrate
acccggucguccuggca

SEQ ID NO: 4517 - RNA, 17 nt, artificial sequence
  misc_feature: oligonucleotide substrate
ucguccuggcaauuccg

SEQ ID NO: 4518 - RNA, 17 nt, artificial sequence
  misc_feature: oligonucleotide substrate
uccuggcaauuccggug

SEQ ID NO: 4519 - RNA, 17 nt, artificial sequence
  misc_feature: oligonucleotide substrate
caauuccgguguacuca

SEQ ID NO: 4520 - RNA, 17 nt, artificial sequence
  misc_feature: oligonucleotide substrate
auuccgguguacucacc

SEQ ID NO: 4521 - RNA, 17 nt, artificial sequence
  misc_feature: oligonucleotide substrate
uccgguguacucaccgg

SEQ ID NO: 4522 - RNA, 17 nt, artificial sequence
  misc_feature: oligonucleotide substrate
guguacucaccgguucc

SEQ ID NO: 4523 - RNA, 17 nt, artificial sequence
  misc_feature: oligonucleotide substrate
acucaccgguuccgcag

SEQ ID NO: 4524 - RNA, 17 nt, artificial sequence
  misc_feature: oligonucleotide substrate
ccgguuccgcagaccac

SEQ ID NO: 4525 - RNA, 17 nt, artificial sequence
  misc_feature: oligonucleotide substrate
uuccgcagaccacuaug

SEQ ID NO: 4526 - RNA, 17 nt, artificial sequence
  misc_feature: oligonucleotide substrate
cgcagaccacuauggcu

SEQ ID NO: 4527 - RNA, 17 nt, artificial sequence
  misc_feature: oligonucleotide substrate
agaccacuauggcucuc

SEQ ID NO: 4528 - RNA, 17 nt, artificial sequence
  misc_feature: oligonucleotide substrate
ccacuauggcucucccg

SEQ ID NO: 4529 - RNA, 17 nt, artificial sequence
  misc_feature: oligonucleotide substrate
gaggggggguccuggag

SEQ ID NO: 4530 - RNA, 17 nt, artificial sequence
  misc_feature: oligonucleotide substrate
uccuggaggcugcacga

SEQ ID NO: 4531 - RNA, 17 nt, artificial sequence
  misc_feature: oligonucleotide substrate
uggaggcugcacgacac

SEQ ID NO: 4532 - RNA, 17 nt, artificial sequence
  misc_feature: oligonucleotide substrate
gaggcugcacgacacuc

SEQ ID NO: 4533 - RNA, 17 nt, artificial sequence
  misc_feature: oligonucleotide substrate
gcugcacgacacucaua

SEQ ID NO: 4534 - RNA, 17 nt, artificial sequence
  misc_feature: oligonucleotide substrate
ugcacgacacucauacu

SEQ ID NO: 4535 - RNA, 17 nt, artificial sequence
  misc_feature: oligonucleotide substrate
cgacacucauacuaacg

SEQ ID NO: 4536 - RNA, 17 nt, artificial sequence
  misc_feature: oligonucleotide substrate
acacucauacuaacgcc

SEQ ID NO: 4537 - RNA, 17 nt, artificial sequence
  misc_feature: oligonucleotide substrate
ucauacuaacgccaugg

SEQ ID NO: 4538 - RNA, 17 nt, artificial sequence
  misc_feature: oligonucleotide substrate
auacuaacgccauggcu

SEQ ID NO: 4539 - RNA, 17 nt, artificial sequence
  misc_feature: oligonucleotide substrate
cuaacgccauggcuaga

SEQ ID NO: 4540 - RNA, 17 nt, artificial sequence
  misc_feature: oligonucleotide substrate
acgccauggcuagacgc

SEQ ID NO: 4541 - RNA, 17 nt, artificial sequence
  misc_feature: oligonucleotide substrate
auggcuagacgcuuucu

SEQ ID NO: 4542 - RNA, 17 nt, artificial sequence
  misc_feature: oligonucleotide substrate
ggcuagacgcuuucugc

SEQ ID NO: 4543 - RNA, 17 nt, artificial sequence
  misc_feature: oligonucleotide substrate
cgcuuucugcgugaaga

SEQ ID NO: 4544 - RNA, 17 nt, artificial sequence
  misc_feature: oligonucleotide substrate
cuuucugcgugaagaca

SEQ ID NO: 4545 - RNA, 17 nt, artificial sequence
  misc_feature: oligonucleotide substrate
gcgugaagacaguaguu

SEQ ID NO: 4546 - RNA, 17 nt, artificial sequence
  misc_feature: oligonucleotide substrate
ugaagacaguaguuccu

SEQ ID NO: 4547 - RNA, 17 nt, artificial sequence
  misc_feature: oligonucleotide substrate
agacaguaguuccucac

SEQ ID NO: 4548 - RNA, 17 nt, artificial sequence
  misc_feature: oligonucleotide substrate
aguuccucacaggggag

SEQ ID NO: 4549 - RNA, 17 nt, artificial sequence
  misc_feature: oligonucleotide substrate
acaggggagugaucuau

SEQ ID NO: 4550 - RNA, 17 nt, artificial sequence
  misc_feature: oligonucleotide substrate
ggggagugaucuauggu

SEQ ID NO: 4551 - RNA, 17 nt, artificial sequence
  misc_feature: oligonucleotide substrate
agugaucuaugguggag

SEQ ID NO: 4552 - RNA, 17 nt, artificial sequence
  misc_feature: oligonucleotide substrate
gaucuaugguggagugu

SEQ ID NO: 4553 - RNA, 17 nt, artificial sequence
  misc_feature: oligonucleotide substrate
augguggagugucgccc

SEQ ID NO: 4554 - RNA, 17 nt, artificial sequence
  misc_feature: oligonucleotide substrate
gguggagugucgccccc

SEQ ID NO: 4555 - RNA, 20 nt, Artificial Sequence
  misc_feature: oligonucleotide substrate
agaccgugcaucaugagcac

SEQ ID NO: 4556 - RNA, 15 nt, Artificial Sequence
  misc_feature: oligonucleotide substrate
ggguccuuucuugga

SEQ ID NO: 4557 - RNA, 15 nt, Artificial Sequence
  misc_feature: oligonucleotide substrate
gcgucuagccauggc

SEQ ID NO: 4558 - RNA, 15 nt, Artificial Sequence
  misc_feature: oligonucleotide substrate
aguaugagugucgug

SEQ ID NO: 4559 - RNA, 15 nt, Artificial Sequence
  misc_feature: oligonucleotide substrate
uaugagugucgugca

SEQ ID NO: 4560 - RNA, 15 nt, Artificial Sequence
  misc_feature: oligonucleotide substrate
gagugucgugcagcc

SEQ ID NO: 4561 - RNA, 15 nt, Artificial Sequence
  misc_feature: oligonucleotide substrate
gugucgugcagccuc

SEQ ID NO: 4562 - RNA, 15 nt, Artificial Sequence
  misc_feature: oligonucleotide substrate
cauaguggucugcgg

SEQ ID NO: 4563 - RNA, 15 nt, Artificial Sequence
  misc_feature: oligonucleotide substrate
cgaccggguccuuuc

SEQ ID NO: 4564 - RNA, 15 nt, Artificial Sequence
  misc_feature: oligonucleotide substrate
gcucaaugccuggag

SEQ ID NO: 4565 - RNA, 15 nt, Artificial Sequence
  misc_feature: oligonucleotide substrate
gauuugggcgugccc

SEQ ID NO: 4566 - RNA, 15 nt, Artificial Sequence
  misc_feature: oligonucleotide substrate
uagccgaguaguguu

SEQ ID NO: 4567 - RNA, 15 nt, Artificial Sequence
  misc_feature: oligonucleotide substrate
ggugcuugcgagugc

SEQ ID NO: 4568 - RNA, 13 nt, Artificial Sequence
  misc_feature: oligonucleotide substrate
gaaagcgucuagc

SEQ ID NO: 4569 - RNA, 15 nt, Artificial Sequence
  misc_feature: oligonucleotide substrate
agaaagcgucuagcc

SEQ ID NO: 4570 - RNA, 15 nt, Artificial Sequence
  misc_feature: oligonucleotide substrate
agccauggcguuagu

SEQ ID NO: 4571 - RNA, 15 nt, Artificial Sequence
  misc_feature: oligonucleotide substrate
ggcguuaguaugagu

SEQ ID NO: 4572 - RNA, 13 nt, Artificial Sequence
  misc_feature: oligonucleotide substrate
augagugucgugc

SEQ ID NO: 4573 - RNA, 13 nt, Artificial Sequence
  misc_feature: oligonucleotide substrate
agugucgugcagc

SEQ ID NO: 4574 - RNA, 15 nt, Artificial Sequence
  misc_feature: oligonucleotide substrate
ucgugcagccuccag

SEQ ID NO: 4575 - RNA, 13 nt, Artificial Sequence
  misc_feature: oligonucleotide substrate
gggagagccauag

SEQ ID NO: 4576 - RNA, 15 nt, Artificial Sequence
  misc_feature: oligonucleotide substrate
cgggagagccauagu

SEQ ID NO: 4577 - RNA, 13 nt, Artificial Sequence
  misc_feature: oligonucleotide substrate
auaguggucugcg

SEQ ID NO: 4578 - RNA, 15 nt, Artificial Sequence
  misc_feature: oligonucleotide substrate
guggucugcggaacc

SEQ ID NO: 4579 - RNA, 15 nt, Artificial Sequence
  misc_feature: oligonucleotide substrate
cggaauugccaggac

SEQ ID NO: 4580 - RNA, 13 nt, Artificial Sequence
  misc_feature: oligonucleotide substrate
gaccggguccuuu

SEQ ID NO: 4581 - RNA, 13 nt, Artificial Sequence
  misc_feature: oligonucleotide substrate
cugcuagccgagu

SEQ ID NO: 4582 - RNA, 15 nt, Artificial Sequence
  misc_feature: oligonucleotide substrate
acugcuagccgagua

SEQ ID NO: 4583 - RNA, 13 nt, Artificial Sequence
  misc_feature: oligonucleotide substrate
agccgaguagugu

SEQ ID NO: 4584 - RNA, 15 nt, Artificial Sequence
  misc_feature: oligonucleotide substrate
gaguaguguuggguc

SEQ ID NO: 4585 - RNA, 13 nt, Artificial Sequence
  misc_feature: oligonucleotide substrate
uguugggucgcga

SEQ ID NO: 4586 - RNA, 15 nt, Artificial Sequence
  misc_feature: oligonucleotide substrate
guguugggucgcgaa

SEQ ID NO: 4587 - RNA, 15 nt, Artificial Sequence
  misc_feature: oligonucleotide substrate
uugggucgcgaaagg

SEQ ID NO: 4588 - RNA, 15 nt, Artificial Sequence
  misc_feature: oligonucleotide substrate
aggccuugugguacu

SEQ ID NO: 4589 - RNA, 15 nt, Artificial Sequence
  misc_feature: oligonucleotide substrate
ccuugugguacugcc

SEQ ID NO: 4590 - RNA, 15 nt, Artificial Sequence
  misc_feature: oligonucleotide substrate
ugguacugccugaua

SEQ ID NO: 4591 - RNA, 15 nt, Artificial Sequence
  misc_feature: oligonucleotide substrate
ugauagggugcuugc

SEQ ID NO: 4592 - RNA, 15 nt, Artificial Sequence
  misc_feature: oligonucleotide substrate
auagggugcuugcga

SEQ ID NO: 4593 - RNA, 13 nt, Artificial Sequence
  misc_feature: oligonucleotide substrate
acuacugucuuca

SEQ ID NO: 4594 - RNA, 15 nt, Artificial Sequence
  misc_feature: oligonucleotide substrate
aacuacugucuucac

SEQ ID NO: 4595 - RNA, 15 nt, Artificial Sequence
  misc_feature: oligonucleotide substrate
ucuucacgcagaaag

SEQ ID NO: 4596 - RNA, 13 nt, Artificial Sequence
  misc_feature: oligonucleotide substrate
cagaaagcgucua

SEQ ID NO: 4597 - RNA, 13 nt, Artificial Sequence
  misc_feature: oligonucleotide substrate
cgucuagccaugg

SEQ ID NO: 4598 - RNA, 13 nt, Artificial Sequence
  misc_feature: oligonucleotide substrate
gccauggcguuag

SEQ ID NO: 4599 - RNA, 13 nt, Artificial Sequence
  misc_feature: oligonucleotide substrate
cauggcguuagua

SEQ ID NO: 4600 - RNA, 15 nt, Artificial Sequence
  misc_feature: oligonucleotide substrate
ccauggcguuaguau

SEQ ID NO: 4601 - RNA, 13 nt, Artificial Sequence
  misc_feature: oligonucleotide substrate
guaugagugucgu

SEQ ID NO: 4602 - RNA, 13 nt, Artificial Sequence
  misc_feature: oligonucleotide substrate
ugucgugcagccu

SEQ ID NO: 4603 - RNA, 13 nt, Artificial Sequence
  misc_feature: oligonucleotide substrate
cgugcagccucca

SEQ ID NO: 4604 - RNA, 13 nt, Artificial Sequence
  misc_feature: oligonucleotide substrate
uggucugcggaac

SEQ ID NO: 4605 - RNA, 15 nt, Artificial Sequence
  misc_feature: oligonucleotide substrate
ggaaccggugaguac

SEQ ID NO: 4606 - RNA, 13 nt, Artificial Sequence
  misc_feature: oligonucleotide substrate
ggaauugccagga

SEQ ID NO: 4607 - RNA, 13 nt, Artificial Sequence
  misc_feature: oligonucleotide substrate
cucaaugccugga

SEQ ID NO: 4608 - RNA, 13 nt, Artificial Sequence
  misc_feature: oligonucleotide substrate
auuugggcgugcc

SEQ ID NO: 4609 - RNA, 13 nt, Artificial Sequence
  misc_feature: oligonucleotide substrate
cgaguaguguugg

SEQ ID NO: 4610 - RNA, 15 nt, Artificial Sequence
  misc_feature: oligonucleotide substrate
ccgaguaguguuggg

SEQ ID NO: 4611 - RNA, 13 nt, Artificial Sequence
  misc_feature: oligonucleotide substrate
aguaguguugggu

SEQ ID NO: 4612 - RNA, 13 nt, Artificial Sequence
  misc_feature: oligonucleotide substrate
ugggucgcgaaag

SEQ ID NO: 4613 - RNA, 13 nt, Artificial Sequence
  misc_feature: oligonucleotide substrate
ggccuugugguac

SEQ ID NO: 4614 - RNA, 13 nt, Artificial Sequence
  misc_feature: oligonucleotide substrate
gguacugccugau

SEQ ID NO: 4615 - RNA, 13 nt, Artificial Sequence
  misc_feature: oligonucleotide substrate
uagggugcuugcg

SEQ ID NO: 4616 - RNA, 13 nt, Artificial Sequence
  misc_feature: oligonucleotide substrate
gugcuugcgagug

SEQ ID NO: 4617 - RNA, 13 nt, Artificial Sequence
  misc_feature: oligonucleotide substrate
cgggaggucucgu

SEQ ID NO: 4618 - RNA, 15 nt, Artificial Sequence
  misc_feature: oligonucleotide substrate
ccgggaggucucgua

SEQ ID NO: 4619 - RNA, 15 nt, Artificial Sequence
  misc_feature: oligonucleotide substrate
gcagaaagcgucuag

SEQ ID NO: 4620 - RNA, 13 nt, Artificial Sequence
  misc_feature: oligonucleotide substrate
gccauaguggucu

SEQ ID NO: 4621 - RNA, 15 nt, Artificial Sequence
  misc_feature: oligonucleotide substrate
gcgaaaggccuugug

SEQ ID NO: 4622 - RNA, 13 nt, Artificial Sequence
  misc_feature: oligonucleotide substrate
cggugaguacacc

SEQ ID NO: 4623 - RNA, 13 nt, Artificial Sequence
  misc_feature: oligonucleotide substrate
cuucacgcagaaa

SEQ ID NO: 4624 - RNA, 13 nt, Artificial Sequence
  misc_feature: oligonucleotide substrate
gcguuaguaugag

SEQ ID NO: 4625 - RNA, 15 nt, Artificial Sequence
  misc_feature: oligonucleotide substrate
agccauaguggucug

SEQ ID NO: 4626 - RNA, 13 nt, Artificial Sequence
  misc_feature: oligonucleotide substrate
gaaccggugagua

SEQ ID NO: 4627 - RNA, 15 nt, Artificial Sequence
  misc_feature: oligonucleotide substrate
ccggugaguacaccg

SEQ ID NO: 4628 - RNA, 13 nt, Artificial Sequence
  misc_feature: oligonucleotide substrate
gagacugcuagcc

SEQ ID NO: 4629 - RNA, 15 nt, Artificial Sequence
  misc_feature: oligonucleotide substrate
cgagacugcuagccg

SEQ ID NO: 4630 - RNA, 13 nt, Artificial Sequence
  misc_feature: oligonucleotide substrate
cgaaaggccuugu

SEQ ID NO: 4631 - RNA, 13 nt, Artificial Sequence
  misc_feature: oligonucleotide substrate
cuugugguacugc

SEQ ID NO: 4632 - RNA, 13 nt, Artificial Sequence
  misc_feature: oligonucleotide substrate
gauagggugcuug

SEQ ID NO: 4633 - RNA, 13 nt, Artificial Sequence
  misc_feature: oligonucleotide substrate
ggucucguagacc

SEQ ID NO: 4634 - RNA, 15 nt, Artificial Sequence
  misc_feature: oligonucleotide substrate
aggucucguagaccg

SEQ ID NO: 4635 - RNA, 13 nt, Artificial Sequence
  misc_feature: oligonucleotide substrate
uagaccgugcacc

SEQ ID NO: 4636 - RNA, 15 nt, Artificial Sequence
  misc_feature: oligonucleotide substrate
uaaaccucaaagaaa

SEQ ID NO: 4637 - RNA, 15 nt, Artificial Sequence
  misc_feature: oligonucleotide substrate
caaacguaacaccaa

SEQ ID NO: 4638 - RNA, 15 nt, Artificial Sequence
  misc_feature: oligonucleotide substrate
caaccgucgcccaca

SEQ ID NO: 4639 - RNA, 15 nt, Artificial Sequence
  misc_feature: oligonucleotide substrate
gagcggucacaaccu

SEQ ID NO: 4640 - RNA, 15 nt, Artificial Sequence
  misc_feature: oligonucleotide substrate
guaaggucaucgaua

SEQ ID NO: 4641 - RNA, 23 nt, Artificial Sequence
  misc_feature: oligonucleotide substrate
ugguggcuccaucuuagcccuag

SEQ ID NO: 4642 - RNA, 23 nt, Artificial Sequence
  misc_feature: oligonucleotide substrate
gguggcuccaucuuagcccuagu

SEQ ID NO: 4643 - RNA, 23 nt, Artificial Sequence
  misc_feature: oligonucleotide substrate
guggcuccaucuuagcccuaguc

SEQ ID NO: 4644 - RNA, 23 nt, Artificial Sequence
  misc_feature: oligonucleotide substrate
uggcuccaucuuagcccuaguca

SEQ ID NO: 4645 - RNA, 23 nt, Artificial Sequence
  misc_feature: oligonucleotide substrate
ggcuccaucuuagcccuagucac

SEQ ID NO: 4646 - RNA, 23 nt, Artificial Sequence
  misc_feature: oligonucleotide substrate
gcuccaucuuagcccuagucacg

SEQ ID NO: 4647 - RNA, 23 nt, Artificial Sequence
  misc_feature: oligonucleotide substrate
cuccaucuuagcccuagucacgg

SEQ ID NO: 4648 - RNA, 23 nt, Artificial Sequence
  misc_feature: oligonucleotide substrate
uccaucuuagcccuagucacggc

SEQ ID NO: 4649 - RNA, 23 nt, Artificial Sequence
  misc_feature: oligonucleotide substrate
ccaucuuagcccuagucacggcu

SEQ ID NO: 4650 - RNA, 23 nt, Artificial Sequence
  misc_feature: oligonucleotide substrate
caucuuagcccuagucacggcua

SEQ ID NO: 4651 - RNA, 23 nt, Artificial Sequence
  misc_feature: oligonucleotide substrate
aucuuagcccuagucacggcuag

SEQ ID NO: 4652 - RNA, 23 nt, Artificial Sequence
  misc_feature: oligonucleotide substrate
ucuuagcccuagucacggcuagc

SEQ ID NO: 4653 - RNA, 23 nt, Artificial Sequence
  misc_feature: oligonucleotide substrate
cuuagcccuagucacggcuagcu

SEQ ID NO: 4654 - RNA, 23 nt, Artificial Sequence
  misc_feature: oligonucleotide substrate
uuagcccuagucacggcuagcug

SEQ ID NO: 4655 - RNA, 23 nt, Artificial Sequence
  misc_feature: oligonucleotide substrate
uagcccuagucacggcuagcugu

SEQ ID NO: 4656 - RNA, 23 nt, Artificial Sequence
  misc_feature: oligonucleotide substrate
agcccuagucacggcuagcugug

SEQ ID NO: 4657 - RNA, 23 nt, Artificial Sequence
  misc_feature: oligonucleotide substrate
gcccuagucacggcuagcuguga

SEQ ID NO: 4658 - RNA, 23 nt, Artificial Sequence
  misc_feature: oligonucleotide substrate
cccuagucacggcuagcugugaa

SEQ ID NO: 4659 - RNA, 23 nt, Artificial Sequence
  misc_feature: oligonucleotide substrate
ccuagucacggcuagcugugaaa

SEQ ID NO: 4660 - RNA, 23 nt, Artificial Sequence
  misc_feature: oligonucleotide substrate
cuagucacggcuagcugugaaag

SEQ ID NO: 4661 - RNA, 23 nt, Artificial Sequence
  misc_feature: oligonucleotide substrate
uagucacggcuagcugugaaagg

SEQ ID NO: 4662 - RNA, 23 nt, Artificial Sequence
  misc_feature: oligonucleotide substrate
agucacggcuagcugugaaaggu

SEQ ID NO: 4663 - RNA, 23 nt, Artificial Sequence
  misc_feature: oligonucleotide substrate
gucacggcuagcugugaaagguc

SEQ ID NO: 4664 - RNA, 23 nt, Artificial Sequence
  misc_feature: oligonucleotide substrate
ucacggcuagcugugaaaggucc

SEQ ID NO: 4665 - RNA, 23 nt, Artificial Sequence
  misc_feature: oligonucleotide substrate
cacggcuagcugugaaagguccg

SEQ ID NO: 4666 - RNA, 23 nt, Artificial Sequence
  misc_feature: oligonucleotide substrate
acggcuagcugugaaagguccgu

SEQ ID NO: 4667 - RNA, 23 nt, Artificial Sequence
  misc_feature: oligonucleotide substrate
cggcuagcugugaaagguccgug

SEQ ID NO: 4668 - RNA, 23 nt, Artificial Sequence
  misc_feature: oligonucleotide substrate
ggcuagcugugaaagguccguga

SEQ ID NO: 4669 - RNA, 23 nt, Artificial Sequence
  misc_feature: oligonucleotide substrate
gcuagcugugaaagguccgugag

SEQ ID NO: 4670 - RNA, 23 nt, Artificial Sequence
  misc_feature: oligonucleotide substrate
cuagcugugaaagguccgugagc

SEQ ID NO: 4671 - RNA, 23 nt, Artificial Sequence
  misc_feature: oligonucleotide substrate
gcaugacugcagagagugcugau

SEQ ID NO: 4672 - RNA, 23 nt, Artificial Sequence
  misc_feature: oligonucleotide substrate
caugacugcagagagugcugaua

SEQ ID NO: 4673 - RNA, 23 nt, Artificial Sequence
  misc_feature: oligonucleotide substrate
augacugcagagagugcugauac

SEQ ID NO: 4674 - RNA, 23 nt, Artificial Sequence
  misc_feature: oligonucleotide substrate
ugacugcagagagugcugauacu

SEQ ID NO: 4675 - RNA, 23 nt, Artificial Sequence
  misc_feature: oligonucleotide substrate
gacugcagagagugcugauacug

SEQ ID NO: 4676 - RNA, 23 nt, Artificial Sequence
  misc_feature: oligonucleotide substrate
acugcagagagugcugauacugg

SEQ ID NO: 4677 - RNA, 23 nt, Artificial Sequence
  misc_feature: oligonucleotide substrate
cugcagagagugcugauacuggc

SEQ ID NO: 4678 - RNA, 23 nt, Artificial Sequence
  misc_feature: oligonucleotide substrate
ugcagagagugcugauacuggcc

SEQ ID NO: 4679 - RNA, 23 nt, Artificial Sequence
  misc_feature: oligonucleotide substrate
gcagagagugcugauacuggccu

SEQ ID NO: 4680 - RNA, 23 nt, Artificial Sequence
  misc_feature: oligonucleotide substrate
cagagagugcugauacuggccuc

SEQ ID NO: 4681 - RNA, 23 nt, Artificial Sequence
  misc_feature: oligonucleotide substrate
agagagugcugauacuggccucu

SEQ ID NO: 4682 - RNA, 23 nt, Artificial Sequence
  misc_feature: oligonucleotide substrate
gagagugcugauacuggccucuc

SEQ ID NO: 4683 - RNA, 13 nt, Artificial Sequence
  misc_feature: oligonucleotide substrate
cggaaccggugag

SEQ ID NO: 4684 - RNA, 13 nt, Artificial Sequence
  misc_feature: oligonucleotide substrate
gaguacaccggaa

SEQ ID NO: 4685 - RNA, 13 nt, Artificial Sequence
  misc_feature: oligonucleotide substrate
gagagccauagug

SEQ ID NO: 4686 - RNA, 13 nt, Artificial Sequence
  misc_feature: oligonucleotide substrate
agagccauagugg

SEQ ID NO: 4687 - RNA, 13 nt, Artificial Sequence
  misc_feature: oligonucleotide substrate
aaggccuuguggu

SEQ ID NO: 4688 - RNA, 13 nt, Artificial Sequence
  misc_feature: oligonucleotide substrate
cccucccgggaga

SEQ ID NO: 4689 - RNA, 13 nt, Artificial Sequence
  misc_feature: oligonucleotide substrate
aaaggccuugugg

SEQ ID NO: 4690 - RNA, 13 nt, Artificial Sequence
  misc_feature: oligonucleotide substrate
guggucugcggaa

SEQ ID NO: 4691 - RNA, 13 nt, Artificial Sequence
  misc_feature: oligonucleotide substrate
ggguccuuucuug

SEQ ID NO: 4692 - RNA, 13 nt, Artificial Sequence
  misc_feature: oligonucleotide substrate
gcuagccgaguag

SEQ ID NO: 4693 - RNA, 13 nt, Artificial Sequence
  misc_feature: oligonucleotide substrate
acugccugauagg

SEQ ID NO: 4694 - RNA, 13 nt, Artificial Sequence
  misc_feature: oligonucleotide substrate
uacugccugauag

SEQ ID NO: 4695 - RNA, 13 nt, Artificial Sequence
  misc_feature: oligonucleotide substrate
ugguacugccuga

SEQ ID NO: 4696 - RNA, 13 nt, Artificial Sequence
  misc_feature: oligonucleotide substrate
guacaccggaauu

SEQ ID NO: 4697 - RNA, 15 nt, Artificial Sequence
  misc_feature: oligonucleotide substrate
guacugccugauagg

SEQ ID NO: 4698 - RNA, 15 nt, Artificial Sequence
  misc_feature: oligonucleotide substrate
uacugccugauaggg

SEQ ID NO: 4699 - RNA, 15 nt, Artificial Sequence
  misc_feature: oligonucleotide substrate
aaaggccuuguggua

SEQ ID NO: 4700 - RNA, 13 nt, Artificial Sequence
  misc_feature: oligonucleotide substrate
ugaguacaccgga

SEQ ID NO: 4701 - RNA, 13 nt, Artificial Sequence
  misc_feature: oligonucleotide substrate
aguacaccggaau

SEQ ID NO: 4702 - RNA, 13 nt, Artificial Sequence
  misc_feature: oligonucleotide substrate
gagccauaguggu

SEQ ID NO: 4703 - RNA, 13 nt, Artificial Sequence
  misc_feature: oligonucleotide substrate
gcggaaccgguga

SEQ ID NO: 4704 - RNA, 13 nt, Artificial Sequence
  misc_feature: oligonucleotide substrate
ugcggaaccggug

SEQ ID NO: 4705 - RNA, 13 nt, Artificial Sequence
  misc_feature: oligonucleotide substrate
gugguacugccug

SEQ ID NO: 4706 - RNA, 13 nt, Artificial Sequence
  misc_feature: oligonucleotide substrate
gccugauagggug

SEQ ID NO: 4707 - RNA, 15 nt, Artificial Sequence
  misc_feature: oligonucleotide substrate
gugaguacaccggaa

SEQ ID NO: 4708 - RNA, 15 nt, Artificial Sequence
  misc_feature: oligonucleotide substrate
agagccauagugguc

SEQ ID NO: 4709 - RNA, 15 nt, Artificial Sequence
  misc_feature: oligonucleotide substrate
ugcggaaccggugag

SEQ ID NO: 4710 - RNA, 15 nt, Artificial Sequence
  misc_feature: oligonucleotide substrate
cugcggaaccgguga

SEQ ID NO: 4711 - RNA, 15 nt, Artificial Sequence
  misc_feature: oligonucleotide substrate
ugugguacugccuga

SEQ ID NO: 4712 - RNA, 15 nt, Artificial Sequence
  misc_feature: oligonucleotide substrate
ugccugauagggugc

SEQ ID NO: 4713 - RNA, 15 nt, Artificial Sequence
  misc_feature: oligonucleotide substrate
gaguacaccggaauu

SEQ ID NO: 4714 - RNA, 13 nt, Artificial Sequence
  misc_feature: oligonucleotide substrate
uccgguguacuca

SEQ ID NO: 4715 - RNA, 13 nt, Artificial Sequence
  misc_feature: oligonucleotide substrate
auuccgguguacu

SEQ ID NO: 4716 - RNA, 13 nt, Artificial Sequence
  misc_feature: oligonucleotide substrate
acuauggcucucc

SEQ ID NO: 4717 - RNA, 13 nt, Artificial Sequence
  misc_feature: oligonucleotide substrate
ucaccgguuccgc

SEQ ID NO: 4718 - RNA, 13 nt, Artificial Sequence
  misc_feature: oligonucleotide substrate
gcgggggcacgcc

SEQ ID NO: 4719 - RNA, 13 nt, Artificial Sequence
  misc_feature: oligonucleotide substrate
cacaaggccuuuc

SEQ ID NO: 4720 - RNA, 13 nt, Artificial Sequence
  misc_feature: oligonucleotide substrate
gguuccgcagacc

SEQ ID NO: 4721 - RNA, 13 nt, Artificial Sequence
  misc_feature: oligonucleotide substrate
uaucaggcaguac

SEQ ID NO: 4722 - RNA, 13 nt, Artificial Sequence
  misc_feature: oligonucleotide substrate
caggcaguaccac

SEQ ID NO: 4723 - RNA, 15 nt, Artificial Sequence
  misc_feature: oligonucleotide substrate
uuccgguguacucac

SEQ ID NO: 4724 - RNA, 15 nt, Artificial Sequence
  misc_feature: oligonucleotide substrate
ccacaaggccuuucg

SEQ ID NO: 4725 - RNA, 15 nt, Artificial Sequence
  misc_feature: oligonucleotide substrate
cucaccgguuccgca

SEQ ID NO: 4726 - RNA, 15 nt, Artificial Sequence
  misc_feature: oligonucleotide substrate
cacuauggcucuccc

SEQ ID NO: 4727 - RNA, 15 nt, Artificial Sequence
  misc_feature: oligonucleotide substrate
cgguuccgcagacca

SEQ ID NO: 4728 - RNA, 15 nt, Artificial Sequence
  misc_feature: oligonucleotide substrate
cuaucaggcaguacc

SEQ ID NO: 4729 - RNA, 15 nt, Artificial Sequence
  misc_feature: oligonucleotide substrate
ucaggcaguaccaca

SEQ ID NO: 4730 - RNA, 15 nt, Artificial Sequence
  misc_feature: oligonucleotide substrate
aauuccgguguacuc

SEQ ID NO: 4731 - RNA, 13 nt, Artificial Sequence
  misc_feature: oligonucleotide substrate
gguguacucaccg

SEQ ID NO: 4732 - RNA, 13 nt, Artificial Sequence
  misc_feature: oligonucleotide substrate
uacucaccgguuc

SEQ ID NO: 4733 - RNA, 13 nt, Artificial Sequence
  misc_feature: oligonucleotide substrate
ccacuauggcucu

SEQ ID NO: 4734 - RNA, 13 nt, Artificial Sequence
  misc_feature: oligonucleotide substrate
accacaaggccuu

SEQ ID NO: 4735 - RNA, 13 nt, Artificial Sequence
  misc_feature: oligonucleotide substrate
ggggcacgcccaa

SEQ ID NO: 4736 - RNA, 13 nt, Artificial Sequence
  misc_feature: oligonucleotide substrate
agaccacuauggc

SEQ ID NO: 4737 - RNA, 13 nt, Artificial Sequence
  misc_feature: oligonucleotide substrate
cgcagaccacuau

SEQ ID NO: 4738 - RNA, 13 nt, Artificial Sequence
  misc_feature: oligonucleotide substrate
ccaagaaaggacc

SEQ ID NO: 4739 - RNA, 13 nt, Artificial Sequence
  misc_feature: oligonucleotide substrate
caagaaaggaccc

SEQ ID NO: 4740 - RNA, 13 nt, Artificial Sequence
  misc_feature: oligonucleotide substrate
guaccacaaggcc

SEQ ID NO: 4741 - RNA, 13 nt, Artificial Sequence
  misc_feature: oligonucleotide substrate
gcaguaccacaag

SEQ ID NO: 4742 - RNA, 13 nt, Artificial Sequence
  misc_feature: oligonucleotide substrate
acccuaucaggca

SEQ ID NO: 4743 - RNA, 13 nt, Artificial Sequence
  misc_feature: oligonucleotide substrate
aaaggacccgguc

SEQ ID NO: 4744 - RNA, 15 nt, Artificial Sequence
  misc_feature: oligonucleotide substrate
cgguguacucaccgg

SEQ ID NO: 4745 - RNA, 15 nt, Artificial Sequence
  misc_feature: oligonucleotide substrate
accacuauggcucuc

SEQ ID NO: 4746 - RNA, 15 nt, Artificial Sequence
  misc_feature: oligonucleotide substrate
guacucaccgguucc

SEQ ID NO: 4747 - RNA, 15 nt, Artificial Sequence
  misc_feature: oligonucleotide substrate
gggggcacgcccaaa

SEQ ID NO: 4748 - RNA, 15 nt, Artificial Sequence
  misc_feature: oligonucleotide substrate
cagaccacuauggcu

SEQ ID NO: 4749 - RNA, 15 nt, Artificial Sequence
  misc_feature: oligonucleotide substrate
ccgcagaccacuaug

SEQ ID NO: 4750 - RNA, 15 nt, Artificial Sequence
  misc_feature: oligonucleotide substrate
uccaagaaaggaccc

SEQ ID NO: 4751 - RNA, 15 nt, Artificial Sequence
  misc_feature: oligonucleotide substrate
aguaccacaaggccu

SEQ ID NO: 4752 - RNA, 15 nt, Artificial Sequence
  misc_feature: oligonucleotide substrate
uaccacaaggccuuu

SEQ ID NO: 4753 - RNA, 15 nt, Artificial Sequence
  misc_feature: oligonucleotide substrate
cacccuaucaggcag

SEQ ID NO: 4754 - RNA, 15 nt, Artificial Sequence
  misc_feature: oligonucleotide substrate
ggcaguaccacaagg

SEQ ID NO: 4755 - RNA, 15 nt, Artificial Sequence
  misc_feature: oligonucleotide substrate
uguauaugccucucc

SEQ ID NO: 4756 - RNA, 15 nt, Artificial Sequence
  misc_feature: oligonucleotide substrate
accgugugccuuaga

SEQ ID NO: 4757 - RNA, 15 nt, Artificial Sequence
  misc_feature: oligonucleotide substrate
guggagugagguggu

SEQ ID NO: 4758 - RNA, 15 nt, Artificial Sequence
  misc_feature: oligonucleotide substrate
acgaguugaaccugu

SEQ ID NO: 4759 - RNA, 15 nt, Artificial Sequence
  misc_feature: oligonucleotide substrate
ccugucugaccaucc

SEQ ID NO: 4760 - RNA, 15 nt, Artificial Sequence
  misc_feature: oligonucleotide substrate
acaaagugcucgucc

SEQ ID NO: 4761 - RNA, 15 nt, Artificial Sequence
  misc_feature: oligonucleotide substrate
gccacuugaccuacc

SEQ ID NO: 4762 - RNA, 15 nt, Artificial Sequence
  misc_feature: oligonucleotide substrate
uccuguugcuuuucc

SEQ ID NO: 4763 - RNA, 15 nt, Artificial Sequence
  misc_feature: oligonucleotide substrate
uccucguguucuucu

SEQ ID NO: 4764 - RNA, 15 nt, Artificial Sequence
  misc_feature: oligonucleotide substrate
cacuccagucaacuc

SEQ ID NO: 4765 - RNA, 15 nt, Artificial Sequence
  misc_feature: oligonucleotide substrate
ucucagugucuucca

SEQ ID NO: 4766 - RNA, 15 nt, Artificial Sequence
  misc_feature: oligonucleotide substrate
uccacaugugcuucg

SEQ ID NO: 4767 - RNA, 15 nt, Artificial Sequence
  misc_feature: oligonucleotide substrate
ucacgccgucuucca

SEQ ID NO: 4768 - RNA, 15 nt, Artificial Sequence
  misc_feature: oligonucleotide substrate
cucuaucuuccucuu

SEQ ID NO: 4769 - RNA, 15 nt, Artificial Sequence
  misc_feature: oligonucleotide substrate
ucucagcuguucacc

SEQ ID NO: 4770 - RNA, 15 nt, Artificial Sequence
  misc_feature: oligonucleotide substrate
uccucuccuuccucg

SEQ ID NO: 4771 - RNA, 15 nt, Artificial Sequence
  misc_feature: oligonucleotide substrate
ucacagccuccauca

SEQ ID NO: 4772 - RNA, 15 nt, Artificial Sequence
  misc_feature: oligonucleotide substrate
cuccacccuuccuca

SEQ ID NO: 4773 - RNA, 15 nt, Artificial Sequence
  misc_feature: oligonucleotide substrate
uggugucucaguguc

SEQ ID NO: 4774 - RNA, 15 nt, Artificial Sequence
  misc_feature: oligonucleotide substrate
cuucgccuucaucuc

SEQ ID NO: 4775 - RNA, 15 nt, Artificial Sequence
  misc_feature: oligonucleotide substrate
accucucucucaucc

SEQ ID NO: 4776 - RNA, 15 nt, Artificial Sequence
  misc_feature: oligonucleotide substrate
uucauccacugcaca

SEQ ID NO: 4777 - RNA, 15 nt, Artificial Sequence
  misc_feature: oligonucleotide substrate
caacagcaucaucca

SEQ ID NO: 4778 - RNA, 15 nt, Artificial Sequence
  misc_feature: oligonucleotide substrate
uccucgucucucagc

SEQ ID NO: 4779 - RNA, 15 nt, Artificial Sequence
  misc_feature: oligonucleotide substrate
ggcacauuaacagga

SEQ ID NO: 4780 - RNA, 15 nt, Artificial Sequence
  misc_feature: oligonucleotide substrate
gcauccucuccuucc

SEQ ID NO: 4781 - RNA, 15 nt, Artificial Sequence
  misc_feature: oligonucleotide substrate
gaggaguacguggag

SEQ ID NO: 4782 - RNA, 15 nt, Artificial Sequence
  misc_feature: oligonucleotide substrate
gcgcauuuucacucc

SEQ ID NO: 4783 - RNA, 15 nt, Artificial Sequence
  misc_feature: oligonucleotide substrate
gacucguaggcucgc

SEQ ID NO: 4784 - RNA, 15 nt, Artificial Sequence
  misc_feature: oligonucleotide substrate
ucagugucuuccagc

SEQ ID NO: 4785 - RNA, 15 nt, Artificial Sequence
  misc_feature: oligonucleotide substrate
ccucucucucauccu

SEQ ID NO: 4786 - RNA, 15 nt, Artificial Sequence
  misc_feature: oligonucleotide substrate
uccacguacuccuca

SEQ ID NO: 4787 - RNA, 15 nt, Artificial Sequence
  misc_feature: oligonucleotide substrate
cgugcauauccaguc

SEQ ID NO: 4788 - RNA, 15 nt, Artificial Sequence
  misc_feature: oligonucleotide substrate
uuucucuaucuuccu

SEQ ID NO: 4789 - RNA, 15 nt, Artificial Sequence
  misc_feature: oligonucleotide substrate
cuuccucgucucuca

SEQ ID NO: 4790 - RNA, 15 nt, Artificial Sequence
  misc_feature: oligonucleotide substrate
cucagcuguucaccu

SEQ ID NO: 4791 - RNA, 15 nt, Artificial Sequence
  misc_feature: oligonucleotide substrate
agccuccaucaccag

SEQ ID NO: 4792 - RNA, 15 nt, Artificial Sequence
  misc_feature: oligonucleotide substrate
ucaacgcauacacca

SEQ ID NO: 4793 - RNA, 15 nt, Artificial Sequence
  misc_feature: oligonucleotide substrate
ucgccgcguccucuu

SEQ ID NO: 4794 - RNA, 15 nt, Artificial Sequence
  misc_feature: oligonucleotide substrate
cgccuucaucuccuu

SEQ ID NO: 4795 - RNA, 15 nt, Artificial Sequence
  misc_feature: oligonucleotide substrate
cucucucauccuccu

SEQ ID NO: 4796 - RNA, 15 nt, Artificial Sequence
  misc_feature: oligonucleotide substrate
ccuccacguacuccu

SEQ ID NO: 4797 - RNA, 15 nt, Artificial Sequence
  misc_feature: oligonucleotide substrate
ccuccaaaucacaac

SEQ ID NO: 4798 - DNA, 31 bp, artificial sequence
  misc_feature: DNAzyme
gtggagtgggctagctacaacgacgccccca

SEQ ID NO: 4799 - DNA, 31 bp, artificial sequence
  misc_feature: DNAzyme
tggtggagggctagctacaacgagtcgcccc

SEQ ID NO: 4800 - DNA, 31 bp, artificial sequence
  misc_feature: DNAzyme
atctatggggctagctacaacgaggagtgtc

SEQ ID NO: 4801 - DNA, 31 bp, artificial sequence
  misc_feature: DNAzyme
gtgatctaggctagctacaacgaggtggagt

SEQ ID NO: 4802 - DNA, 31 bp, artificial sequence
  misc_feature: DNAzyme
gggagtgaggctagctacaacgactatggtg

SEQ ID NO: 4803 - DNA, 31 bp, artificial sequence
  misc_feature: DNAzyme
caggggagggctagctacaacgagatctatg

SEQ ID NO: 4804 - DNA, 31 bp, artificial sequence
  misc_feature: DNAzyme
gttcctcaggctagctacaacgaaggggagt

SEQ ID NO: 4805 - DNA, 31 bp, artificial sequence
  misc_feature: DNAzyme
gacagtagggctagctacaacgatcctcaca

SEQ ID NO: 4806 - DNA, 31 bp, artificial sequence
  misc_feature: DNAzyme
gaagacagggctagctacaacgaagttcctc

SEQ ID NO: 4807 - DNA, 31 bp, artificial sequence
  misc_feature: DNAzyme
cgtgaagaggctagctacaacgaagtagttc

SEQ ID NO: 4808 - DNA, 31 bp, artificial sequence
  misc_feature: DNAzyme
tttctgcgggctagctacaacgagaagacag

SEQ ID NO: 4809 - DNA, 31 bp, artificial sequence
  misc_feature: DNAzyme
gctttctgggctagctacaacgagtgaagac

SEQ ID NO: 4810 - DNA, 31 bp, artificial sequence
  misc_feature: DNAzyme
gctagacgggctagctacaacgatttctgcg

SEQ ID NO: 4811 - DNA, 31 bp, artificial sequence
  misc_feature: DNAzyme
tggctagaggctagctacaacgagctttctg

SEQ ID NO: 4812 - DNA, 31 bp, artificial sequence
  misc_feature: DNAzyme
cgccatggggctagctacaacgatagacgct

SEQ ID NO: 4813 - DNA, 31 bp, artificial sequence
  misc_feature: DNAzyme
taacgccaggctagctacaacgaggctagac

SEQ ID NO: 4814 - DNA, 31 bp, artificial sequence
  misc_feature: DNAzyme
tactaacgggctagctacaacgacatggcta

SEQ ID NO: 4815 - DNA, 31 bp, artificial sequence
  misc_feature: DNAzyme
catactaaggctagctacaacgagccatggc

SEQ ID NO: 4816 - DNA, 31 bp, artificial sequence
  misc_feature: DNAzyme
cactcataggctagctacaacgataacgcca

SEQ ID NO: 4817 - DNA, 31 bp, artificial sequence
  misc_feature: DNAzyme
gacactcaggctagctacaacgaactaacgc

SEQ ID NO: 4818 - DNA, 31 bp, artificial sequence
  misc_feature: DNAzyme
gcacgacaggctagctacaacgatcatacta

SEQ ID NO: 4819 - DNA, 31 bp, artificial sequence
  misc_feature: DNAzyme
ctgcacgaggctagctacaacgaactcatac

SEQ ID NO: 4820 - DNA, 31 bp, artificial sequence
  misc_feature: DNAzyme
aggctgcaggctagctacaacgagacactca

SEQ ID NO: 4821 - DNA, 31 bp, artificial sequence
  misc_feature: DNAzyme
ggaggctgggctagctacaacgaacgacact

SEQ ID NO: 4822 - DNA, 31 bp, artificial sequence
  misc_feature: DNAzyme
cctggaggggctagctacaacgatgcacgac

SEQ ID NO: 4823 - DNA, 31 bp, artificial sequence
  misc_feature: DNAzyme
agggggggggctagctacaacgacctggagg

SEQ ID NO: 4824 - DNA, 31 bp, artificial sequence
  misc_feature: DNAzyme
cactatggggctagctacaacgatctcccgg

SEQ ID NO: 4825 - DNA, 31 bp, artificial sequence
  misc_feature: DNAzyme
gaccactaggctagctacaacgaggctctcc

SEQ ID NO: 4826 - DNA, 31 bp, artificial sequence
  misc_feature: DNAzyme
gcagaccaggctagctacaacgatatggctc

SEQ ID NO: 4827 - DNA, 31 bp, artificial sequence
  misc_feature: DNAzyme
tccgcagaggctagctacaacgacactatgg

SEQ ID NO: 4828 - DNA, 31 bp, artificial sequence
  misc_feature: DNAzyme
cggttccgggctagctacaacgaagaccact

SEQ ID NO: 4829 - DNA, 31 bp, artificial sequence
  misc_feature: DNAzyme
ctcaccggggctagctacaacgatccgcaga

SEQ ID NO: 4830 - DNA, 31 bp, artificial sequence
  misc_feature: DNAzyme
tgtactcaggctagctacaacgacggttccg

SEQ ID NO: 4831 - DNA, 31 bp, artificial sequence
  misc_feature: DNAzyme
ccggtgtaggctagctacaacgatcaccggt

SEQ ID NO: 4832 - DNA, 31 bp, artificial sequence
  misc_feature: DNAzyme
ttccggtgggctagctacaacgaactcaccg

SEQ ID NO: 4833 - DNA, 31 bp, artificial sequence
  misc_feature: DNAzyme
aattccggggctagctacaacgagtactcac

SEQ ID NO: 4834 - DNA, 31 bp, artificial sequence
  misc_feature: DNAzyme
cctggcaaggctagctacaacgatccggtgt

SEQ ID NO: 4835 - DNA, 31 bp, artificial sequence
  misc_feature: DNAzyme
cgtcctggggctagctacaacgaaattccgg

SEQ ID NO: 4836 - DNA, 31 bp, artificial sequence
  misc_feature: DNAzyme
cccggtcgggctagctacaacgacctggcaa

SEQ ID NO: 4837 - DNA, 31 bp, artificial sequence
  misc_feature: DNAzyme
ggacccggggctagctacaacgacgtcctgg

SEQ ID NO: 4838 - DNA, 31 bp, artificial sequence
  misc_feature: DNAzyme
agaaaggaggctagctacaacgaccggtcgt

SEQ ID NO: 4839 - DNA, 31 bp, artificial sequence
  misc_feature: DNAzyme
cgggttgaggctagctacaacgaccaagaaa

SEQ ID NO: 4840 - DNA, 31 bp, artificial sequence
  misc_feature: DNAzyme
tgagcgggggctagctacaacgatgatccaa

SEQ ID NO: 4841 - DNA, 31 bp, artificial sequence
  misc_feature: DNAzyme
gcattgagggctagctacaacgagggttgat

SEQ ID NO: 4842 - DNA, 31 bp, artificial sequence
  misc_feature: DNAzyme
tccaggcaggctagctacaacgatgagcggg

SEQ ID NO: 4843 - DNA, 31 bp, artificial sequence
  misc_feature: DNAzyme
tctccaggggctagctacaacgaattgagcg

SEQ ID NO: 4844 - DNA, 31 bp, artificial sequence
  misc_feature: DNAzyme
cgcccaaaggctagctacaacgactccaggc

SEQ ID NO: 4845 - DNA, 31 bp, artificial sequence
  misc_feature: DNAzyme
ggggcacgggctagctacaacgaccaaatct

SEQ ID NO: 4846 - DNA, 31 bp, artificial sequence
  misc_feature: DNAzyme
cgggggcaggctagctacaacgagcccaaat

SEQ ID NO: 4847 - DNA, 31 bp, artificial sequence
  misc_feature: DNAzyme
cgcgggggggctagctacaacgaacgcccaa

SEQ ID NO: 4848 - DNA, 31 bp, artificial sequence
  misc_feature: DNAzyme
cagtctcgggctagctacaacgagggggcac

SEQ ID NO: 4849 - DNA, 31 bp, artificial sequence
  misc_feature: DNAzyme
gctagcagggctagctacaacgactcgcggg

SEQ ID NO: 4850 - DNA, 31 bp, artificial sequence
  misc_feature: DNAzyme
tcggctagggctagctacaacgaagtctcgc

SEQ ID NO: 4851 - DNA, 31 bp, artificial sequence
  misc_feature: DNAzyme
ctactcggggctagctacaacgatagcagtc

SEQ ID NO: 4852 - DNA, 31 bp, artificial sequence
  misc_feature: DNAzyme
caacactaggctagctacaacgatcggctag

SEQ ID NO: 4853 - DNA, 31 bp, artificial sequence
  misc_feature: DNAzyme
acccaacaggctagctacaacgatactcggc

SEQ ID NO: 4854 - DNA, 31 bp, artificial sequence
  misc_feature: DNAzyme
cgacccaaggctagctacaacgaactactcg

SEQ ID NO: 4855 - DNA, 31 bp, artificial sequence
  misc_feature: DNAzyme
tttcgcgaggctagctacaacgaccaacact

SEQ ID NO: 4856 - DNA, 31 bp, artificial sequence
  misc_feature: DNAzyme
gcctttcgggctagctacaacgagacccaac

SEQ ID NO: 4857 - DNA, 31 bp, artificial sequence
  misc_feature: DNAzyme
ccacaaggggctagctacaacgactttcgcg

SEQ ID NO: 4858 - DNA, 31 bp, artificial sequence
  misc_feature: DNAzyme
cagtaccaggctagctacaacgaaaggcctt

SEQ ID NO: 4859 - DNA, 31 bp, artificial sequence
  misc_feature: DNAzyme
aggcagtaggctagctacaacgacacaaggc

SEQ ID NO: 4860 - DNA, 31 bp, artificial sequence
  misc_feature: DNAzyme
tcaggcagggctagctacaacgaaccacaag

SEQ ID NO: 4861 - DNA, 31 bp, artificial sequence
  misc_feature: DNAzyme
ctatcaggggctagctacaacgaagtaccac

SEQ ID NO: 4862 - DNA, 31 bp, artificial sequence
  misc_feature: DNAzyme
gcaccctaggctagctacaacgacaggcagt

SEQ ID NO: 4863 - DNA, 31 bp, artificial sequence
  misc_feature: DNAzyme
cgcaagcaggctagctacaacgacctatcag

SEQ ID NO: 4864 - DNA, 31 bp, artificial sequence
  misc_feature: DNAzyme
ctcgcaagggctagctacaacgaaccctatc

SEQ ID NO: 4865 - DNA, 31 bp, artificial sequence
  misc_feature: DNAzyme
ggcactcgggctagctacaacgaaagcaccc

SEQ ID NO: 4866 - DNA, 31 bp, artificial sequence
  misc_feature: DNAzyme
ccggggcaggctagctacaacgatcgcaagc

SEQ ID NO: 4867 - DNA, 31 bp, artificial sequence
  misc_feature: DNAzyme
tcccggggggctagctacaacgaactcgcaa

SEQ ID NO: 4868 - DNA, 31 bp, artificial sequence
  misc_feature: DNAzyme
ctacgagaggctagctacaacgactcccggg

SEQ ID NO: 4869 - DNA, 31 bp, artificial sequence
  misc_feature: DNAzyme
acggtctaggctagctacaacgagagacctc

SEQ ID NO: 4870 - DNA, 31 bp, artificial sequence
  misc_feature: DNAzyme
gtgcacggggctagctacaacgactacgaga

SEQ ID NO: 4871 - DNA, 31 bp, artificial sequence
  misc_feature: DNAzyme
atggtgcaggctagctacaacgaggtctacg

SEQ ID NO: 4872 - DNA, 31 bp, artificial sequence
  misc_feature: DNAzyme
tcatggtgggctagctacaacgaacggtcta

SEQ ID NO: 4873 - DNA, 31 bp, artificial sequence
  misc_feature: DNAzyme
gctcatggggctagctacaacgagcacggtc

SEQ ID NO: 4874 - DNA, 31 bp, artificial sequence
  misc_feature: DNAzyme
cgtgctcaggctagctacaacgaggtgcacg

SEQ ID NO: 4875 - DNA, 31 bp, artificial sequence
  misc_feature: DNAzyme
gattcgtgggctagctacaacgatcatggtg

SEQ ID NO: 4876 - DNA, 31 bp, artificial sequence
  misc_feature: DNAzyme
aggattcgggctagctacaacgagctcatgg

SEQ ID NO: 4877 - DNA, 31 bp, artificial sequence
  misc_feature: DNAzyme
gtttaggaggctagctacaacgatcgtgctc

SEQ ID NO: 4878 - DNA, 31 bp, artificial sequence
  misc_feature: DNAzyme
ctttgaggggctagctacaacgattaggatt

SEQ ID NO: 4879 - DNA, 31 bp, artificial sequence
  misc_feature: DNAzyme
acgtttggggctagctacaacgattttcttt

SEQ ID NO: 4880 - DNA, 31 bp, artificial sequence
  misc_feature: DNAzyme
gtgttacgggctagctacaacgattggtttt

SEQ ID NO: 4881 - DNA, 31 bp, artificial sequence
  misc_feature: DNAzyme
tggtgttaggctagctacaacgagtttggtt

SEQ ID NO: 4882 - DNA, 31 bp, artificial sequence
  misc_feature: DNAzyme
ggttggtgggctagctacaacgatacgtttg

SEQ ID NO: 4883 - DNA, 31 bp, artificial sequence
  misc_feature: DNAzyme
gcggttggggctagctacaacgagttacgtt

SEQ ID NO: 4884 - DNA, 31 bp, artificial sequence
  misc_feature: DNAzyme
ggcggcggggctagctacaacgatggtgtta

SEQ ID NO: 4885 - DNA, 31 bp, artificial sequence
  misc_feature: DNAzyme
gtgggcggggctagctacaacgaggttggtg

SEQ ID NO: 4886 - DNA, 31 bp, artificial sequence
  misc_feature: DNAzyme
cctgtgggggctagctacaacgaggcggttg

SEQ ID NO: 4887 - DNA, 31 bp, artificial sequence
  misc_feature: DNAzyme
acgtcctgggctagctacaacgagggcggcg

SEQ ID NO: 4888 - DNA, 31 bp, artificial sequence
  misc_feature: DNAzyme
acttgacgggctagctacaacgacctgtggg

SEQ ID NO: 4889 - DNA, 31 bp, artificial sequence
  misc_feature: DNAzyme
gaacttgaggctagctacaacgagtcctgtg

SEQ ID NO: 4890 - DNA, 31 bp, artificial sequence
  misc_feature: DNAzyme
cccgggaaggctagctacaacgattgacgtc

SEQ ID NO: 4891 - DNA, 31 bp, artificial sequence
  misc_feature: DNAzyme
gaccaccgggctagctacaacgaccgggaac

SEQ ID NO: 4892 - DNA, 31 bp, artificial sequence
  misc_feature: DNAzyme
tctgaccaggctagctacaacgacgcccggg

SEQ ID NO: 4893 - DNA, 31 bp, artificial sequence
  misc_feature: DNAzyme
cgatctgaggctagctacaacgacaccgccc

SEQ ID NO: 4894 - DNA, 31 bp, artificial sequence
  misc_feature: DNAzyme
accaacgaggctagctacaacgactgaccac

SEQ ID NO: 4895 - DNA, 31 bp, artificial sequence
  misc_feature: DNAzyme
tccaccaaggctagctacaacgagatctgac

SEQ ID NO: 4896 - DNA, 31 bp, artificial sequence
  misc_feature: DNAzyme
aaactccaggctagctacaacgacaacgatc

SEQ ID NO: 4897 - DNA, 31 bp, artificial sequence
  misc_feature: DNAzyme
caggtaaaggctagctacaacgatccaccaa

SEQ ID NO: 4898 - DNA, 31 bp, artificial sequence
  misc_feature: DNAzyme
gcaacaggggctagctacaacgaaaactcca

SEQ ID NO: 4899 - DNA, 31 bp, artificial sequence
  misc_feature: DNAzyme
cgcggcaaggctagctacaacgaaggtaaac

SEQ ID NO: 4900 - DNA, 31 bp, artificial sequence
  misc_feature: DNAzyme
ctgcgcggggctagctacaacgaaacaggta

SEQ ID NO: 4901 - DNA, 31 bp, artificial sequence
  misc_feature: DNAzyme
cccctgcgggctagctacaacgaggcaacag

SEQ ID NO: 4902 - DNA, 31 bp, artificial sequence
  misc_feature: DNAzyme
ggcccctgggctagctacaacgagcggcaac

SEQ ID NO: 4903 - DNA, 31 bp, artificial sequence
  misc_feature: DNAzyme
acctggggggctagctacaacgaccctgcgc

SEQ ID NO: 4904 - DNA, 31 bp, artificial sequence
  misc_feature: DNAzyme
acacccaaggctagctacaacgactggggcc

SEQ ID NO: 4905 - DNA, 31 bp, artificial sequence
  misc_feature: DNAzyme
cgcgcacaggctagctacaacgaccaacctg

SEQ ID NO: 4906 - DNA, 31 bp, artificial sequence
  misc_feature: DNAzyme
cgcgcgcaggctagctacaacgaacccaacc

SEQ ID NO: 4907 - DNA, 31 bp, artificial sequence
  misc_feature: DNAzyme
gtcgcgcgggctagctacaacgaacacccaa

SEQ ID NO: 4908 - DNA, 31 bp, artificial sequence
  misc_feature: DNAzyme
tagtcgcgggctagctacaacgagcacaccc

SEQ ID NO: 4909 - DNA, 31 bp, artificial sequence
  misc_feature: DNAzyme
cctagtcgggctagctacaacgagcgcacac

SEQ ID NO: 4910 - DNA, 31 bp, artificial sequence
  misc_feature: DNAzyme
cttcctagggctagctacaacgacgcgcgca

SEQ ID NO: 4911 - DNA, 31 bp, artificial sequence
  misc_feature: DNAzyme
ctcggaagggctagctacaacgacttcctag

SEQ ID NO: 4912 - DNA, 31 bp, artificial sequence
  misc_feature: DNAzyme
tgcgaccgggctagctacaacgatcggaagt

SEQ ID NO: 4913 - DNA, 31 bp, artificial sequence
  misc_feature: DNAzyme
ggttgcgaggctagctacaacgacgctcgga

SEQ ID NO: 4914 - DNA, 31 bp, artificial sequence
  misc_feature: DNAzyme
cgaggttgggctagctacaacgagaccgctc

SEQ ID NO: 4915 - DNA, 31 bp, artificial sequence
  misc_feature: DNAzyme
ccacgaggggctagctacaacgatgcgaccg

SEQ ID NO: 4916 - DNA, 31 bp, artificial sequence
  misc_feature: DNAzyme
gccttccaggctagctacaacgagaggttgc

SEQ ID NO: 4917 - DNA, 31 bp, artificial sequence
  misc_feature: DNAzyme
ggttgtcgggctagctacaacgacttccacg

SEQ ID NO: 4918 - DNA, 31 bp, artificial sequence
  misc_feature: DNAzyme
ataggttgggctagctacaacgacgccttcc

SEQ ID NO: 4919 - DNA, 31 bp, artificial sequence
  misc_feature: DNAzyme
gggataggggctagctacaacgatgtcgcct

SEQ ID NO: 4920 - DNA, 31 bp, artificial sequence
  misc_feature: DNAzyme
cttggggaggctagctacaacgaaggttgtc

SEQ ID NO: 4921 - DNA, 31 bp, artificial sequence
  misc_feature: DNAzyme
ccggcgagggctagctacaacgacttgggga

SEQ ID NO: 4922 - DNA, 31 bp, artificial sequence
  misc_feature: DNAzyme
cgggccggggctagctacaacgagagccttg

SEQ ID NO: 4923 - DNA, 31 bp, artificial sequence
  misc_feature: DNAzyme
ccctcgggggctagctacaacgacggcgagc

SEQ ID NO: 4924 - DNA, 31 bp, artificial sequence
  misc_feature: DNAzyme
aggccctgggctagctacaacgacctcgggc

SEQ ID NO: 4925 - DNA, 31 bp, artificial sequence
  misc_feature: DNAzyme
agcccaggggctagctacaacgacctgccct

SEQ ID NO: 4926 - DNA, 31 bp, artificial sequence
  misc_feature: DNAzyme
gggctgagggctagctacaacgaccaggccc

SEQ ID NO: 4927 - DNA, 31 bp, artificial sequence
  misc_feature: DNAzyme
tacccgggggctagctacaacgatgagccca

SEQ ID NO: 4928 - DNA, 31 bp, artificial sequence
  misc_feature: DNAzyme
caagggtaggctagctacaacgaccgggctg

SEQ ID NO: 4929 - DNA, 31 bp, artificial sequence
  misc_feature: DNAzyme
gccaagggggctagctacaacgaacccgggc

SEQ ID NO: 4930 - DNA, 31 bp, artificial sequence
  misc_feature: DNAzyme
tagaggggggctagctacaacgacaagggta

SEQ ID NO: 4931 - DNA, 31 bp, artificial sequence
  misc_feature: DNAzyme
cattgccaggctagctacaacgaagaggggc

SEQ ID NO: 4932 - DNA, 31 bp, artificial sequence
  misc_feature: DNAzyme
cctcattgggctagctacaacgacatagagg

SEQ ID NO: 4933 - DNA, 31 bp, artificial sequence
  misc_feature: DNAzyme
agccctcaggctagctacaacgatgccatag

SEQ ID NO: 4934 - DNA, 31 bp, artificial sequence
  misc_feature: DNAzyme
accctaagggctagctacaacgacctcattg

SEQ ID NO: 4935 - DNA, 31 bp, artificial sequence
  misc_feature: DNAzyme
cctgcccaggctagctacaacgacctaagcc

SEQ ID NO: 4936 - DNA, 31 bp, artificial sequence
  misc_feature: DNAzyme
ccatcctgggctagctacaacgaccacccta

SEQ ID NO: 4937 - DNA, 31 bp, artificial sequence
  misc_feature: DNAzyme
aggagccaggctagctacaacgacctgccca

SEQ ID NO: 4938 - DNA, 31 bp, artificial sequence
  misc_feature: DNAzyme
gacaggagggctagctacaacgacatcctgc

SEQ ID NO: 4939 - DNA, 31 bp, artificial sequence
  misc_feature: DNAzyme
cggggtgaggctagctacaacgaaggagcca

SEQ ID NO: 4940 - DNA, 31 bp, artificial sequence
  misc_feature: DNAzyme
ccgcggggggctagctacaacgagacaggag

SEQ ID NO: 4941 - DNA, 31 bp, artificial sequence
  misc_feature: DNAzyme
gggagccgggctagctacaacgaggggtgac

SEQ ID NO: 4942 - DNA, 31 bp, artificial sequence
  misc_feature: DNAzyme
gccgggagggctagctacaacgacgcggggt

SEQ ID NO: 4943 - DNA, 31 bp, artificial sequence
  misc_feature: DNAzyme
caactaggggctagctacaacgacgggagcc

SEQ ID NO: 4944 - DNA, 31 bp, artificial sequence
  misc_feature: DNAzyme
ggccccaaggctagctacaacgataggccgg

SEQ ID NO: 4945 - DNA, 31 bp, artificial sequence
  misc_feature: DNAzyme
ccgtggggggctagctacaacgacccaacta

SEQ ID NO: 4946 - DNA, 31 bp, artificial sequence
  misc_feature: DNAzyme
ggggtccgggctagctacaacgaggggcccc

SEQ ID NO: 4947 - DNA, 31 bp, artificial sequence
  misc_feature: DNAzyme
gccgggggggctagctacaacgaccgtgggg

SEQ ID NO: 4948 - DNA, 31 bp, artificial sequence
  misc_feature: DNAzyme
gacctacgggctagctacaacgacgggggtc

SEQ ID NO: 4949 - DNA, 31 bp, artificial sequence
  misc_feature: DNAzyme
gcgacctaggctagctacaacgagccggggg

SEQ ID NO: 4950 - DNA, 31 bp, artificial sequence
  misc_feature: DNAzyme
ttacgcgaggctagctacaacgactacgccg

SEQ ID NO: 4951 - DNA, 31 bp, artificial sequence
  misc_feature: DNAzyme
aagttacgggctagctacaacgagacctacg

SEQ ID NO: 4952 - DNA, 31 bp, artificial sequence
  misc_feature: DNAzyme
ccaagttaggctagctacaacgagcgaccta

SEQ ID NO: 4953 - DNA, 31 bp, artificial sequence
  misc_feature: DNAzyme
tacccaagggctagctacaacgatacgcgac

SEQ ID NO: 4954 - DNA, 31 bp, artificial sequence
  misc_feature: DNAzyme
tgaccttaggctagctacaacgaccaagtta

SEQ ID NO: 4955 - DNA, 31 bp, artificial sequence
  misc_feature: DNAzyme
atcgatgaggctagctacaacgacttaccca

SEQ ID NO: 4956 - DNA, 31 bp, artificial sequence
  misc_feature: DNAzyme
ggtatcgaggctagctacaacgagaccttac

SEQ ID NO: 4957 - DNA, 31 bp, artificial sequence
  misc_feature: DNAzyme
tgagggtaggctagctacaacgacgatgacc

SEQ ID NO: 4958 - DNA, 31 bp, artificial sequence
  misc_feature: DNAzyme
tgtgagggggctagctacaacgaatcgatga

SEQ ID NO: 4959 - DNA, 31 bp, artificial sequence
  misc_feature: DNAzyme
gccgcatgggctagctacaacgagagggtat

SEQ ID NO: 4960 - DNA, 31 bp, artificial sequence
  misc_feature: DNAzyme
aagccgcaggctagctacaacgagtgagggt

SEQ ID NO: 4961 - DNA, 31 bp, artificial sequence
  misc_feature: DNAzyme
cgaagccgggctagctacaacgaatgtgagg

SEQ ID NO: 4962 - DNA, 31 bp, artificial sequence
  misc_feature: DNAzyme
cggcgaagggctagctacaacgacgcatgtg

SEQ ID NO: 4963 - DNA, 31 bp, artificial sequence
  misc_feature: DNAzyme
gaggtcggggctagctacaacgagaagccgc

SEQ ID NO: 4964 - DNA, 31 bp, artificial sequence
  misc_feature: DNAzyme
ccatgaggggctagctacaacgacggcgaag

SEQ ID NO: 4965 - DNA, 31 bp, artificial sequence
  misc_feature: DNAzyme
gtaccccaggctagctacaacgagaggtcgg

SEQ ID NO: 4966 - DNA, 31 bp, artificial sequence
  misc_feature: DNAzyme
ggaatgtaggctagctacaacgacccatgag

SEQ ID NO: 4967 - DNA, 31 bp, artificial sequence
  misc_feature: DNAzyme
gcggaatgggctagctacaacgaaccccatg

SEQ ID NO: 4968 - DNA, 31 bp, artificial sequence
  misc_feature: DNAzyme
gagcggaaggctagctacaacgagtacccca

SEQ ID NO: 4969 - DNA, 31 bp, artificial sequence
  misc_feature: DNAzyme
ccgacgagggctagctacaacgaggaatgta

SEQ ID NO: 4970 - DNA, 31 bp, artificial sequence
  misc_feature: DNAzyme
ggcgccgaggctagctacaacgagagcggaa

SEQ ID NO: 4971 - DNA, 31 bp, artificial sequence
  misc_feature: DNAzyme
agggggcgggctagctacaacgacgacgagc

SEQ ID NO: 4972 - DNA, 31 bp, artificial sequence
  misc_feature: DNAzyme
caagggggggctagctacaacgagccgacga

SEQ ID NO: 4973 - DNA, 31 bp, artificial sequence
  misc_feature: DNAzyme
tggcagtgggctagctacaacgactcccaag

SEQ ID NO: 4974 - DNA, 31 bp, artificial sequence
  misc_feature: DNAzyme
cctggcagggctagctacaacgagcctccca

SEQ ID NO: 4975 - DNA, 31 bp, artificial sequence
  misc_feature: DNAzyme
ggccctggggctagctacaacgaagtgcctc

SEQ ID NO: 4976 - DNA, 31 bp, artificial sequence
  misc_feature: DNAzyme
cgccagggggctagctacaacgacctggcag

SEQ ID NO: 4977 - DNA, 31 bp, artificial sequence
  misc_feature: DNAzyme
gccatgcgggctagctacaacgacagggccc

SEQ ID NO: 4978 - DNA, 31 bp, artificial sequence
  misc_feature: DNAzyme
acgccatgggctagctacaacgagccagggc

SEQ ID NO: 4979 - DNA, 31 bp, artificial sequence
  misc_feature: DNAzyme
ggacgccaggctagctacaacgagcgccagg

SEQ ID NO: 4980 - DNA, 31 bp, artificial sequence
  misc_feature: DNAzyme
cccggacgggctagctacaacgacatgcgcc

SEQ ID NO: 4981 - DNA, 31 bp, artificial sequence
  misc_feature: DNAzyme
aacccggaggctagctacaacgagccatgcg

SEQ ID NO: 4982 - DNA, 31 bp, artificial sequence
  misc_feature: DNAzyme
ttccagaaggctagctacaacgaccggacgc

SEQ ID NO: 4983 - DNA, 31 bp, artificial sequence
  misc_feature: DNAzyme
tcacgccgggctagctacaacgacttccaga

SEQ ID NO: 4984 - DNA, 31 bp, artificial sequence
  misc_feature: DNAzyme
agttcacgggctagctacaacgacgtcttcc

SEQ ID NO: 4985 - DNA, 31 bp, artificial sequence
  misc_feature: DNAzyme
atagttcaggctagctacaacgagccgtctt

SEQ ID NO: 4986 - DNA, 31 bp, artificial sequence
  misc_feature: DNAzyme
ttgcatagggctagctacaacgatcacgccg

SEQ ID NO: 4987 - DNA, 31 bp, artificial sequence
  misc_feature: DNAzyme
ctgttgcaggctagctacaacgaagttcacg

SEQ ID NO: 4988 - DNA, 31 bp, artificial sequence
  misc_feature: DNAzyme
ccctgttgggctagctacaacgaatagttca

SEQ ID NO: 4989 - DNA, 31 bp, artificial sequence
  misc_feature: DNAzyme
attccctgggctagctacaacgatgcatagt

SEQ ID NO: 4990 - DNA, 31 bp, artificial sequence
  misc_feature: DNAzyme
cgggcagaggctagctacaacgatccctgtt

SEQ ID NO: 4991 - DNA, 31 bp, artificial sequence
  misc_feature: DNAzyme
caaccgggggctagctacaacgaagattccc

SEQ ID NO: 4992 - DNA, 31 bp, artificial sequence
  misc_feature: DNAzyme
aagagcaaggctagctacaacgacgggcaga

SEQ ID NO: 4993 - DNA, 31 bp, artificial sequence
  misc_feature: DNAzyme
agaaagagggctagctacaacgaaaccgggc

SEQ ID NO: 4994 - DNA, 31 bp, artificial sequence
  misc_feature: DNAzyme
gaggaagaggctagctacaacgaagagaaag

SEQ ID NO: 4995 - DNA, 31 bp, artificial sequence
  misc_feature: DNAzyme
cagcagagggctagctacaacgacaagagga

SEQ ID NO: 4996 - DNA, 31 bp, artificial sequence
  misc_feature: DNAzyme
cagggcagggctagctacaacgaagagccaa

SEQ ID NO: 4997 - DNA, 31 bp, artificial sequence
  misc_feature: DNAzyme
agacagggggctagctacaacgaagcagagc

SEQ ID NO: 4998 - DNA, 31 bp, artificial sequence
  misc_feature: DNAzyme
tggtcagaggctagctacaacgaagggcagc

SEQ ID NO: 4999 - DNA, 31 bp, artificial sequence
  misc_feature: DNAzyme
tgggatggggctagctacaacgacagacagg

SEQ ID NO: 5000 - DNA, 31 bp, artificial sequence
  misc_feature: DNAzyme
ggctgggaggctagctacaacgaggtcagac

SEQ ID NO: 5001 - DNA, 31 bp, artificial sequence
  misc_feature: DNAzyme
agcggaggggctagctacaacgatgggatgg

SEQ ID NO: 5002 - DNA, 31 bp, artificial sequence
  misc_feature: DNAzyme
ctcataagggctagctacaacgaggaggctg

SEQ ID NO: 5003 - DNA, 31 bp, artificial sequence
  misc_feature: DNAzyme
acacctcaggctagctacaacgaaagcggag

SEQ ID NO: 5004 - DNA, 31 bp, artificial sequence
  misc_feature: DNAzyme
gttgcacaggctagctacaacgactcataag

SEQ ID NO: 5005 - DNA, 31 bp, artificial sequence
  misc_feature: DNAzyme
gcgttgcaggctagctacaacgaacctcata

SEQ ID NO: 5006 - DNA, 31 bp, artificial sequence
  misc_feature: DNAzyme
acgcgttgggctagctacaacgaacacctca

SEQ ID NO: 5007 - DNA, 31 bp, artificial sequence
  misc_feature: DNAzyme
cggacgcgggctagctacaacgatgcacacc

SEQ ID NO: 5008 - DNA, 31 bp, artificial sequence
  misc_feature: DNAzyme
cccggacgggctagctacaacgagttgcaca

SEQ ID NO: 5009 - DNA, 31 bp, artificial sequence
  misc_feature: DNAzyme
agcccggaggctagctacaacgagcgttgca

SEQ ID NO: 5010 - DNA, 31 bp, artificial sequence
  misc_feature: DNAzyme
tggtacagggctagctacaacgaccggacgc

SEQ ID NO: 5011 - DNA, 31 bp, artificial sequence
  misc_feature: DNAzyme
acatggtaggctagctacaacgaagcccgga

SEQ ID NO: 5012 - DNA, 31 bp, artificial sequence
  misc_feature: DNAzyme
tgacatggggctagctacaacgaacagcccg

SEQ ID NO: 5013 - DNA, 31 bp, artificial sequence
  misc_feature: DNAzyme
tcgtgacaggctagctacaacgaggtacagc

SEQ ID NO: 5014 - DNA, 31 bp, artificial sequence
  misc_feature: DNAzyme
gttcgtgaggctagctacaacgaatggtaca

SEQ ID NO: 5015 - DNA, 31 bp, artificial sequence
  misc_feature: DNAzyme
atcgttcgggctagctacaacgagacatggt

SEQ ID NO: 5016 - DNA, 31 bp, artificial sequence
  misc_feature: DNAzyme
agcaatcgggctagctacaacgatcgtgaca

SEQ ID NO: 5017 - DNA, 31 bp, artificial sequence
  misc_feature: DNAzyme
tggagcaaggctagctacaacgacgttcgtg

SEQ ID NO: 5018 - DNA, 31 bp, artificial sequence
  misc_feature: DNAzyme
agttggagggctagctacaacgaaatcgttc

SEQ ID NO: 5019 - DNA, 31 bp, artificial sequence
  misc_feature: DNAzyme
tgcttgagggctagctacaacgatggagcaa

SEQ ID NO: 5020 - DNA, 31 bp, artificial sequence
  misc_feature: DNAzyme
acacaatgggctagctacaacgattgagttg

SEQ ID NO: 5021 - DNA, 31 bp, artificial sequence
  misc_feature: DNAzyme
atacacaaggctagctacaacgagcttgagt

SEQ ID NO: 5022 - DNA, 31 bp, artificial sequence
  misc_feature: DNAzyme
ctcatacaggctagctacaacgaaatgcttg

SEQ ID NO: 5023 - DNA, 31 bp, artificial sequence
  misc_feature: DNAzyme
gcctcataggctagctacaacgaacaatgct

SEQ ID NO: 5024 - DNA, 31 bp, artificial sequence
  misc_feature: DNAzyme
ctgcctcaggctagctacaacgaacacaatg

SEQ ID NO: 5025 - DNA, 31 bp, artificial sequence
  misc_feature: DNAzyme
gtcctctgggctagctacaacgactcataca

SEQ ID NO: 5026 - DNA, 31 bp, artificial sequence
  misc_feature: DNAzyme
tgatcatgggctagctacaacgacctctgcc

SEQ ID NO: 5027 - DNA, 31 bp, artificial sequence
  misc_feature: DNAzyme
catgatcaggctagctacaacgagtcctctg

SEQ ID NO: 5028 - DNA, 31 bp, artificial sequence
  misc_feature: DNAzyme
gtgcatgaggctagctacaacgacatgtcct

SEQ ID NO: 5029 - DNA, 31 bp, artificial sequence
  misc_feature: DNAzyme
ggtgtgcaggctagctacaacgagatcatgt

SEQ ID NO: 5030 - DNA, 31 bp, artificial sequence
  misc_feature: DNAzyme
ggggtgtgggctagctacaacgaatgatcat

SEQ ID NO: 5031 - DNA, 31 bp, artificial sequence
  misc_feature: DNAzyme
ccggggtgggctagctacaacgagcatgatc

SEQ ID NO: 5032 - DNA, 31 bp, artificial sequence
  misc_feature: DNAzyme
ccccggggggctagctacaacgagtgcatga

SEQ ID NO: 5033 - DNA, 31 bp, artificial sequence
  misc_feature: DNAzyme
ggcacgcaggctagctacaacgacccggggt

SEQ ID NO: 5034 - DNA, 31 bp, artificial sequence
  misc_feature: DNAzyme
agggcacgggctagctacaacgaaccccggg

SEQ ID NO: 5035 - DNA, 31 bp, artificial sequence
  misc_feature: DNAzyme
gcagggcaggctagctacaacgagcaccccg

SEQ ID NO: 5036 - DNA, 31 bp, artificial sequence
  misc_feature: DNAzyme
acgcagggggctagctacaacgaacgcaccc

SEQ ID NO: 5037 - DNA, 31 bp, artificial sequence
  misc_feature: DNAzyme
cccgaacgggctagctacaacgaagggcacg

SEQ ID NO: 5038 - DNA, 31 bp, artificial sequence
  misc_feature: DNAzyme
ctcccgaaggctagctacaacgagcagggca

SEQ ID NO: 5039 - DNA, 31 bp, artificial sequence
  misc_feature: DNAzyme
aggagttgggctagctacaacgatctcccga

SEQ ID NO: 5040 - DNA, 31 bp, artificial sequence
  misc_feature: DNAzyme
gggaggagggctagctacaacgatgttctcc

SEQ ID NO: 5041 - DNA, 31 bp, artificial sequence
  misc_feature: DNAzyme
cccagcagggctagctacaacgagggaggag

SEQ ID NO: 5042 - DNA, 31 bp, artificial sequence
  misc_feature: DNAzyme
ctacccagggctagctacaacgaagcgggag

SEQ ID NO: 5043 - DNA, 31 bp, artificial sequence
  misc_feature: DNAzyme
gagcgctaggctagctacaacgaccagcagc

SEQ ID NO: 5044 - DNA, 31 bp, artificial sequence
  misc_feature: DNAzyme
agtgagcgggctagctacaacgatacccagc

SEQ ID NO: 5045 - DNA, 31 bp, artificial sequence
  misc_feature: DNAzyme
ggagtgagggctagctacaacgagctaccca

SEQ ID NO: 5046 - DNA, 31 bp, artificial sequence
  misc_feature: DNAzyme
cgtgggagggctagctacaacgagagcgcta

SEQ ID NO: 5047 - DNA, 31 bp, artificial sequence
  misc_feature: DNAzyme
cgcgagcgggctagctacaacgagggagtga

SEQ ID NO: 5048 - DNA, 31 bp, artificial sequence
  misc_feature: DNAzyme
gccgcgagggctagctacaacgagtgggagt

SEQ ID NO: 5049 - DNA, 31 bp, artificial sequence
  misc_feature: DNAzyme
cctggccgggctagctacaacgagagcgtgg

SEQ ID NO: 5050 - DNA, 31 bp, artificial sequence
  misc_feature: DNAzyme
attcctggggctagctacaacgacgcgagcg

SEQ ID NO: 5051 - DNA, 31 bp, artificial sequence
  misc_feature: DNAzyme
tgctggcaggctagctacaacgatcctggcc

SEQ ID NO: 5052 - DNA, 31 bp, artificial sequence
  misc_feature: DNAzyme
gatgctggggctagctacaacgaattcctgg

SEQ ID NO: 5053 - DNA, 31 bp, artificial sequence
  misc_feature: DNAzyme
tggggatgggctagctacaacgatggcattc

SEQ ID NO: 5054 - DNA, 31 bp, artificial sequence
  misc_feature: DNAzyme
agtggggaggctagctacaacgagctggcat

SEQ ID NO: 5055 - DNA, 31 bp, artificial sequence
  misc_feature: DNAzyme
cgtcgtagggctagctacaacgaggggatgc

SEQ ID NO: 5056 - DNA, 31 bp, artificial sequence
  misc_feature: DNAzyme
tatcgtcgggctagctacaacgaagtgggga

SEQ ID NO: 5057 - DNA, 31 bp, artificial sequence
  misc_feature: DNAzyme
ccgtatcgggctagctacaacgacgtagtgg

SEQ ID NO: 5058 - DNA, 31 bp, artificial sequence
  misc_feature: DNAzyme
acgccgtaggctagctacaacgacgtcgtag

SEQ ID NO: 5059 - DNA, 31 bp, artificial sequence
  misc_feature: DNAzyme
tgacgccgggctagctacaacgaatcgtcgt

SEQ ID NO: 5060 - DNA, 31 bp, artificial sequence
  misc_feature: DNAzyme
acgtgacgggctagctacaacgacgtatcgt

SEQ ID NO: 5061 - DNA, 31 bp, artificial sequence
  misc_feature: DNAzyme
cgacgtgaggctagctacaacgagccgtatc

SEQ ID NO: 5062 - DNA, 31 bp, artificial sequence
  misc_feature: DNAzyme
aatcgacgggctagctacaacgagacgccgt

SEQ ID NO: 5063 - DNA, 31 bp, artificial sequence
  misc_feature: DNAzyme
caaatcgaggctagctacaacgagtgacgcc

SEQ ID NO: 5064 - DNA, 31 bp, artificial sequence
  misc_feature: DNAzyme
cgagcaaaggctagctacaacgacgacgtga

SEQ ID NO: 5065 - DNA, 31 bp, artificial sequence
  misc_feature: DNAzyme
ccaacgagggctagctacaacgaaaatcgac

SEQ ID NO: 5066 - DNA, 31 bp, artificial sequence
  misc_feature: DNAzyme
cgccccaaggctagctacaacgagagcaaat

SEQ ID NO: 5067 - DNA, 31 bp, artificial sequence
  misc_feature: DNAzyme
agcagccgggctagctacaacgacccaacga

SEQ ID NO: 5068 - DNA, 31 bp, artificial sequence
  misc_feature: DNAzyme
gaaagcagggctagctacaacgacgccccaa

SEQ ID NO: 5069 - DNA, 31 bp, artificial sequence
  misc_feature: DNAzyme
gcagaaagggctagctacaacgaagccgccc

SEQ ID NO: 5070 - DNA, 31 bp, artificial sequence
  misc_feature: DNAzyme
tagcagagggctagctacaacgaagaaagca

SEQ ID NO: 5071 - DNA, 31 bp, artificial sequence
  misc_feature: DNAzyme
gtacatagggctagctacaacgaagagcaga

SEQ ID NO: 5072 - DNA, 31 bp, artificial sequence
  misc_feature: DNAzyme
cacgtacaggctagctacaacgaagcagagc

SEQ ID NO: 5073 - DNA, 31 bp, artificial sequence
  misc_feature: DNAzyme
cccacgtaggctagctacaacgaatagcaga

SEQ ID NO: 5074 - DNA, 31 bp, artificial sequence
  misc_feature: DNAzyme
cccccacgggctagctacaacgaacatagca

SEQ ID NO: 5075 - DNA, 31 bp, artificial sequence
  misc_feature: DNAzyme
atcccccaggctagctacaacgagtacatag

SEQ ID NO: 5076 - DNA, 31 bp, artificial sequence
  misc_feature: DNAzyme
cgcagagaggctagctacaacgacccccacg

SEQ ID NO: 5077 - DNA, 31 bp, artificial sequence
  misc_feature: DNAzyme
cagatccgggctagctacaacgaagagatcc

SEQ ID NO: 5078 - DNA, 31 bp, artificial sequence
  misc_feature: DNAzyme
aagacagaggctagctacaacgaccgcagag

SEQ ID NO: 5079 - DNA, 31 bp, artificial sequence
  misc_feature: DNAzyme
gaggaagaggctagctacaacgaagatccgc

SEQ ID NO: 5080 - DNA, 31 bp, artificial sequence
  misc_feature: DNAzyme
ctgagagaggctagctacaacgagaggaaga

SEQ ID NO: 5081 - DNA, 31 bp, artificial sequence
  misc_feature: DNAzyme
gtgaacagggctagctacaacgatgagagac

SEQ ID NO: 5082 - DNA, 31 bp, artificial sequence
  misc_feature: DNAzyme
aaggtgaaggctagctacaacgaagctgaga

SEQ ID NO: 5083 - DNA, 31 bp, artificial sequence
  misc_feature: DNAzyme
cgagaaggggctagctacaacgagaacagct

SEQ ID NO: 5084 - DNA, 31 bp, artificial sequence
  misc_feature: DNAzyme
cggcgaggggctagctacaacgagagaaggt

SEQ ID NO: 5085 - DNA, 31 bp, artificial sequence
  misc_feature: DNAzyme
cataccggggctagctacaacgagaggcgag

SEQ ID NO: 5086 - DNA, 31 bp, artificial sequence
  misc_feature: DNAzyme
gtctcataggctagctacaacgacggcgagg

SEQ ID NO: 5087 - DNA, 31 bp, artificial sequence
  misc_feature: DNAzyme
ctgtctcaggctagctacaacgaaccggcga

SEQ ID NO: 5088 - DNA, 31 bp, artificial sequence
  misc_feature: DNAzyme
ctgtactgggctagctacaacgactcatacc

SEQ ID NO: 5089 - DNA, 31 bp, artificial sequence
  misc_feature: DNAzyme
gtcctgtaggctagctacaacgatgtctcat

SEQ ID NO: 5090 - DNA, 31 bp, artificial sequence
  misc_feature: DNAzyme
cagtcctgggctagctacaacgaactgtctc

SEQ ID NO: 5091 - DNA, 31 bp, artificial sequence
  misc_feature: DNAzyme
aattacagggctagctacaacgacctgtact

SEQ ID NO: 5092 - DNA, 31 bp, artificial sequence
  misc_feature: DNAzyme
agcaattaggctagctacaacgaagtcctgt

SEQ ID NO: 5093 - DNA, 31 bp, artificial sequence
  misc_feature: DNAzyme
tcgagcaaggctagctacaacgatacagtcc

SEQ ID NO: 5094 - DNA, 31 bp, artificial sequence
  misc_feature: DNAzyme
agatcgagggctagctacaacgaaattacag

SEQ ID NO: 5095 - DNA, 31 bp, artificial sequence
  misc_feature: DNAzyme
gggatagaggctagctacaacgacgagcaat

SEQ ID NO: 5096 - DNA, 31 bp, artificial sequence
  misc_feature: DNAzyme
ggccgggaggctagctacaacgaagatcgag

SEQ ID NO: 5097 - DNA, 31 bp, artificial sequence
  misc_feature: DNAzyme
atacgtggggctagctacaacgacgggatag

SEQ ID NO: 5098 - DNA, 31 bp, artificial sequence
  misc_feature: DNAzyme
ctgatacgggctagctacaacgaggccggga

SEQ ID NO: 5099 - DNA, 31 bp, artificial sequence
  misc_feature: DNAzyme
gcctgataggctagctacaacgagtggccgg

SEQ ID NO: 5100 - DNA, 31 bp, artificial sequence
  misc_feature: DNAzyme
tggcctgaggctagctacaacgaacgtggcc

SEQ ID NO: 5101 - DNA, 31 bp, artificial sequence
  misc_feature: DNAzyme
tgcgatggggctagctacaacgactgatacg

SEQ ID NO: 5102 - DNA, 31 bp, artificial sequence
  misc_feature: DNAzyme
ccatgcgaggctagctacaacgaggcctgat

SEQ ID NO: 5103 - DNA, 31 bp, artificial sequence
  misc_feature: DNAzyme
aagccatgggctagctacaacgagatggcct

SEQ ID NO: 5104 - DNA, 31 bp, artificial sequence
  misc_feature: DNAzyme
ccaagccaggctagctacaacgagcgatggc

SEQ ID NO: 5105 - DNA, 31 bp, artificial sequence
  misc_feature: DNAzyme
atcccaagggctagctacaacgacatgcgat

SEQ ID NO: 5106 - DNA, 31 bp, artificial sequence
  misc_feature: DNAzyme
tcatcataggctagctacaacgacccaagcc

SEQ ID NO: 5107 - DNA, 31 bp, artificial sequence
  misc_feature: DNAzyme
catcatcaggctagctacaacgaatcccaag

SEQ ID NO: 5108 - DNA, 31 bp, artificial sequence
  misc_feature: DNAzyme
attcatcaggctagctacaacgacatatccc

SEQ ID NO: 5109 - DNA, 31 bp, artificial sequence
  misc_feature: DNAzyme
ccaattcaggctagctacaacgacatcatat

SEQ ID NO: 5110 - DNA, 31 bp, artificial sequence
  misc_feature: DNAzyme
gtgaccaaggctagctacaacgatcatcatc

SEQ ID NO: 5111 - DNA, 31 bp, artificial sequence
  misc_feature: DNAzyme
gtaggtgaggctagctacaacgacaattcat

SEQ ID NO: 5112 - DNA, 31 bp, artificial sequence
  misc_feature: DNAzyme
gttgtaggggctagctacaacgagaccaatt

SEQ ID NO: 5113 - DNA, 31 bp, artificial sequence
  misc_feature: DNAzyme
ggctgttgggctagctacaacgaaggtgacc

SEQ ID NO: 5114 - DNA, 31 bp, artificial sequence
  misc_feature: DNAzyme
tagggctgggctagctacaacgatgtaggtg

SEQ ID NO: 5115 - DNA, 31 bp, artificial sequence
  misc_feature: DNAzyme
cactagggggctagctacaacgatgttgtag

SEQ ID NO: 5116 - DNA, 31 bp, artificial sequence
  misc_feature: DNAzyme
cgataccaggctagctacaacgatagggctg

SEQ ID NO: 5117 - DNA, 31 bp, artificial sequence
  misc_feature: DNAzyme
ctgcgataggctagctacaacgacactaggg

SEQ ID NO: 5118 - DNA, 31 bp, artificial sequence
  misc_feature: DNAzyme
aactgcgaggctagctacaacgaaccactag

SEQ ID NO: 5119 - DNA, 31 bp, artificial sequence
  misc_feature: DNAzyme
agcaactgggctagctacaacgagataccac

SEQ ID NO: 5120 - DNA, 31 bp, artificial sequence
  misc_feature: DNAzyme
cggagcaaggctagctacaacgatgcgatac

SEQ ID NO: 5121 - DNA, 31 bp, artificial sequence
  misc_feature: DNAzyme
atccggagggctagctacaacgaaactgcga

SEQ ID NO: 5122 - DNA, 31 bp, artificial sequence
  misc_feature: DNAzyme
ttgtgggaggctagctacaacgaccggagca

SEQ ID NO: 5123 - DNA, 31 bp, artificial sequence
  misc_feature: DNAzyme
acggcttgggctagctacaacgagggatccg

SEQ ID NO: 5124 - DNA, 31 bp, artificial sequence
  misc_feature: DNAzyme
cacgacggggctagctacaacgattgtggga

SEQ ID NO: 5125 - DNA, 31 bp, artificial sequence
  misc_feature: DNAzyme
gtccacgaggctagctacaacgaggcttgtg

SEQ ID NO: 5126 - DNA, 31 bp, artificial sequence
  misc_feature: DNAzyme
catgtccaggctagctacaacgagacggctt

SEQ ID NO: 5127 - DNA, 31 bp, artificial sequence
  misc_feature: DNAzyme
ccaccatgggctagctacaacgaccacgacg

SEQ ID NO: 5128 - DNA, 31 bp, artificial sequence
  misc_feature: DNAzyme
cgccaccaggctagctacaacgagtccacga

SEQ ID NO: 5129 - DNA, 31 bp, artificial sequence
  misc_feature: DNAzyme
ccccgccaggctagctacaacgacatgtcca

SEQ ID NO: 5130 - DNA, 31 bp, artificial sequence
  misc_feature: DNAzyme
ggcccccgggctagctacaacgacaccatgt

SEQ ID NO: 5131 - DNA, 31 bp, artificial sequence
  misc_feature: DNAzyme
ccagtgggggctagctacaacgaccccgcca

SEQ ID NO: 5132 - DNA, 31 bp, artificial sequence
  misc_feature: DNAzyme
ctccccagggctagctacaacgagggccccc

SEQ ID NO: 5133 - DNA, 31 bp, artificial sequence
  misc_feature: DNAzyme
cgccaggaggctagctacaacgatccccagt

SEQ ID NO: 5134 - DNA, 31 bp, artificial sequence
  misc_feature: DNAzyme
aaggcccgggctagctacaacgacaggactc

SEQ ID NO: 5135 - DNA, 31 bp, artificial sequence
  misc_feature: DNAzyme
aggcaaggggctagctacaacgaccgccagg

SEQ ID NO: 5136 - DNA, 31 bp, artificial sequence
  misc_feature: DNAzyme
ataataggggctagctacaacgaaaggcccg

SEQ ID NO: 5137 - DNA, 31 bp, artificial sequence
  misc_feature: DNAzyme
tggaataaggctagctacaacgaaggcaagg

SEQ ID NO: 5138 - DNA, 31 bp, artificial sequence
  misc_feature: DNAzyme
ccatggaaggctagctacaacgaaataggca

SEQ ID NO: 5139 - DNA, 31 bp, artificial sequence
  misc_feature: DNAzyme
ccccaccaggctagctacaacgaggaataat

SEQ ID NO: 5140 - DNA, 31 bp, artificial sequence
  misc_feature: DNAzyme
gttccccaggctagctacaacgacatggaat

SEQ ID NO: 5141 - DNA, 31 bp, artificial sequence
  misc_feature: DNAzyme
tagcccagggctagctacaacgatccccacc

SEQ ID NO: 5142 - DNA, 31 bp, artificial sequence
  misc_feature: DNAzyme
caccttagggctagctacaacgaccagttcc

SEQ ID NO: 5143 - DNA, 31 bp, artificial sequence
  misc_feature: DNAzyme
aatcaacaggctagctacaacgacttagccc

SEQ ID NO: 5144 - DNA, 31 bp, artificial sequence
  misc_feature: DNAzyme
acaatcaaggctagctacaacgaaccttagc

SEQ ID NO: 5145 - DNA, 31 bp, artificial sequence
  misc_feature: DNAzyme
catcacaaggctagctacaacgacaacacct

SEQ ID NO: 5146 - DNA, 31 bp, artificial sequence
  misc_feature: DNAzyme
tagcatcaggctagctacaacgaaatcaaca

SEQ ID NO: 5147 - DNA, 31 bp, artificial sequence
  misc_feature: DNAzyme
gagtagcaggctagctacaacgacacaatca

SEQ ID NO: 5148 - DNA, 31 bp, artificial sequence
  misc_feature: DNAzyme
aagagtagggctagctacaacgaatcacaat

SEQ ID NO: 5149 - DNA, 31 bp, artificial sequence
  misc_feature: DNAzyme
gcaaagagggctagctacaacgaagcatcac

SEQ ID NO: 5150 - DNA, 31 bp, artificial sequence
  misc_feature: DNAzyme
aacgccggggctagctacaacgaaaagagta

SEQ ID NO: 5151 - DNA, 31 bp, artificial sequence
  misc_feature: DNAzyme
cgtcaacgggctagctacaacgacggcaaag

SEQ ID NO: 5152 - DNA, 31 bp, artificial sequence
  misc_feature: DNAzyme
cccgtcaaggctagctacaacgagccggcaa

SEQ ID NO: 5153 - DNA, 31 bp, artificial sequence
  misc_feature: DNAzyme
tgtccccgggctagctacaacgacaacgccg

SEQ ID NO: 5154 - DNA, 31 bp, artificial sequence
  misc_feature: DNAzyme
tgtaggtgggctagctacaacgaccccgtca

SEQ ID NO: 5155 - DNA, 31 bp, artificial sequence
  misc_feature: DNAzyme
cgtgtaggggctagctacaacgagtccccgt

SEQ ID NO: 5156 - DNA, 31 bp, artificial sequence
  misc_feature: DNAzyme
ctgtcgtgggctagctacaacgaaggtgtcc

SEQ ID NO: 5157 - DNA, 31 bp, artificial sequence
  misc_feature: DNAzyme
ccctgtcgggctagctacaacgagtaggtgt

SEQ ID NO: 5158 - DNA, 31 bp, artificial sequence
  misc_feature: DNAzyme
cccccctgggctagctacaacgacgtgtagg

SEQ ID NO: 5159 - DNA, 31 bp, artificial sequence
  misc_feature: DNAzyme
gccctgcgggctagctacaacgacccccctg

SEQ ID NO: 5160 - DNA, 31 bp, artificial sequence
  misc_feature: DNAzyme
tggccctgggctagctacaacgagccccccc

SEQ ID NO: 5161 - DNA, 31 bp, artificial sequence
  misc_feature: DNAzyme
tggtgtggggctagctacaacgacctgcgcc

SEQ ID NO: 5162 - DNA, 31 bp, artificial sequence
  misc_feature: DNAzyme
tagtggtgggctagctacaacgaggccctgc

SEQ ID NO: 5163 - DNA, 31 bp, artificial sequence
  misc_feature: DNAzyme
actagtggggctagctacaacgagtggccct

SEQ ID NO: 5164 - DNA, 31 bp, artificial sequence
  misc_feature: DNAzyme
cctactagggctagctacaacgaggtgtggc

SEQ ID NO: 5165 - DNA, 31 bp, artificial sequence
  misc_feature: DNAzyme
ccaccctaggctagctacaacgatagtggtg

SEQ ID NO: 5166 - DNA, 31 bp, artificial sequence
  misc_feature: DNAzyme
ggatgccaggctagctacaacgacctactag

SEQ ID NO: 5167 - DNA, 31 bp, artificial sequence
  misc_feature: DNAzyme
gagggatgggctagctacaacgacaccctac

SEQ ID NO: 5168 - DNA, 31 bp, artificial sequence
  misc_feature: DNAzyme
aagagggaggctagctacaacgagccaccct

SEQ ID NO: 5169 - DNA, 31 bp, artificial sequence
  misc_feature: DNAzyme
tccagatgggctagctacaacgaaaagaggg

SEQ ID NO: 5170 - DNA, 31 bp, artificial sequence
  misc_feature: DNAzyme
gctccagaggctagctacaacgagtaaagag

SEQ ID NO: 5171 - DNA, 31 bp, artificial sequence
  misc_feature: DNAzyme
ctgagatgggctagctacaacgatccagatg

SEQ ID NO: 5172 - DNA, 31 bp, artificial sequence
  misc_feature: DNAzyme
ttctgagaggctagctacaacgagctccaga

SEQ ID NO: 5173 - DNA, 31 bp, artificial sequence
  misc_feature: DNAzyme
gctggataggctagctacaacgatctgagat

SEQ ID NO: 5174 - DNA, 31 bp, artificial sequence
  misc_feature: DNAzyme
aagctggaggctagctacaacgaattctgag

SEQ ID NO: 5175 - DNA, 31 bp, artificial sequence
  misc_feature: DNAzyme
ttaataagggctagctacaacgatggatatt

SEQ ID NO: 5176 - DNA, 31 bp, artificial sequence
  misc_feature: DNAzyme
ggtgttaaggctagctacaacgaaagctgga

SEQ ID NO: 5177 - DNA, 31 bp, artificial sequence
  misc_feature: DNAzyme
cgttggtgggctagctacaacgataataagc

SEQ ID NO: 5178 - DNA, 31 bp, artificial sequence
  misc_feature: DNAzyme
gccgttggggctagctacaacgagttaataa

SEQ ID NO: 5179 - DNA, 31 bp, artificial sequence
  misc_feature: DNAzyme
agctgccgggctagctacaacgatggtgtta

SEQ ID NO: 5180 - DNA, 31 bp, artificial sequence
  misc_feature: DNAzyme
gccagctgggctagctacaacgacgttggtg

SEQ ID NO: 5181 - DNA, 31 bp, artificial sequence
  misc_feature: DNAzyme
tgtgccagggctagctacaacgatgccgttg

SEQ ID NO: 5182 - DNA, 31 bp, artificial sequence
  misc_feature: DNAzyme
ttaatgtgggctagctacaacgacagctgcc

SEQ ID NO: 5183 - DNA, 31 bp, artificial sequence
  misc_feature: DNAzyme
tgttaatgggctagctacaacgagccagctg

SEQ ID NO: 5184 - DNA, 31 bp, artificial sequence
  misc_feature: DNAzyme
cctgttaaggctagctacaacgagtgccagc

SEQ ID NO: 5185 - DNA, 31 bp, artificial sequence
  misc_feature: DNAzyme
cagtcctgggctagctacaacgataatgtgc

SEQ ID NO: 5186 - DNA, 31 bp, artificial sequence
  misc_feature: DNAzyme
cagggcagggctagctacaacgacctgttaa

SEQ ID NO: 5187 - DNA, 31 bp, artificial sequence
  misc_feature: DNAzyme
gttcagggggctagctacaacgaagtcctgt

SEQ ID NO: 5188 - DNA, 31 bp, artificial sequence
  misc_feature: DNAzyme
cattgcagggctagctacaacgatcagggca

SEQ ID NO: 5189 - DNA, 31 bp, artificial sequence
  misc_feature: DNAzyme
agtcattgggctagctacaacgaagttcagg

SEQ ID NO: 5190 - DNA, 31 bp, artificial sequence
  misc_feature: DNAzyme
gggagtcaggctagctacaacgatgcagttc

SEQ ID NO: 5191 - DNA, 31 bp, artificial sequence
  misc_feature: DNAzyme
ggagggagggctagctacaacgacattgcag

SEQ ID NO: 5192 - DNA, 31 bp, artificial sequence
  misc_feature: DNAzyme
gaacccggggctagctacaacgattggaggg

SEQ ID NO: 5193 - DNA, 31 bp, artificial sequence
  misc_feature: DNAzyme
gcaatgaaggctagctacaacgaccggtttg

SEQ ID NO: 5194 - DNA, 31 bp, artificial sequence
  misc_feature: DNAzyme
tgcagcaaggctagctacaacgagaacccgg

SEQ ID NO: 5195 - DNA, 31 bp, artificial sequence
  misc_feature: DNAzyme
cagtgcagggctagctacaacgaaatgaacc

SEQ ID NO: 5196 - DNA, 31 bp, artificial sequence
  misc_feature: DNAzyme
gaacagtgggctagctacaacgaagcaatga

SEQ ID NO: 5197 - DNA, 31 bp, artificial sequence
  misc_feature: DNAzyme
tagaacagggctagctacaacgagcagcaat

SEQ ID NO: 5198 - DNA, 31 bp, artificial sequence
  misc_feature: DNAzyme
gcatagaaggctagctacaacgaagtgcagc

SEQ ID NO: 5199 - DNA, 31 bp, artificial sequence
  misc_feature: DNAzyme
tgtgtgcaggctagctacaacgaagaacagt

SEQ ID NO: 5200 - DNA, 31 bp, artificial sequence
  misc_feature: DNAzyme
cctgtgtgggctagctacaacgaatagaaca

SEQ ID NO: 5201 - DNA, 31 bp, artificial sequence
  misc_feature: DNAzyme
aacctgtgggctagctacaacgagcatagaa

SEQ ID NO: 5202 - DNA, 31 bp, artificial sequence
  misc_feature: DNAzyme
tgaacctgggctagctacaacgagtgcatag

SEQ ID NO: 5203 - DNA, 31 bp, artificial sequence
  misc_feature: DNAzyme
gagttgaaggctagctacaacgactgtgtgc

SEQ ID NO: 5204 - DNA, 31 bp, artificial sequence
  misc_feature: DNAzyme
cggacgagggctagctacaacgatgaacctg

SEQ ID NO: 5205 - DNA, 31 bp, artificial sequence
  misc_feature: DNAzyme
catccggaggctagctacaacgagagttgaa

SEQ ID NO: 5206 - DNA, 31 bp, artificial sequence
  misc_feature: DNAzyme
tgtgggcaggctagctacaacgaccggacga

SEQ ID NO: 5207 - DNA, 31 bp, artificial sequence
  misc_feature: DNAzyme
gctgtgggggctagctacaacgaatccggac

SEQ ID NO: 5208 - DNA, 31 bp, artificial sequence
  misc_feature: DNAzyme
aagcgctgggctagctacaacgagggcatcc

SEQ ID NO: 5209 - DNA, 31 bp, artificial sequence
  misc_feature: DNAzyme
gccaagcgggctagctacaacgatgtgggca

SEQ ID NO: 5210 - DNA, 31 bp, artificial sequence
  misc_feature: DNAzyme
tggccaagggctagctacaacgagctgtggg

SEQ ID NO: 5211 - DNA, 31 bp, artificial sequence
  misc_feature: DNAzyme
gcagctggggctagctacaacgacaagcgct

SEQ ID NO: 5212 - DNA, 31 bp, artificial sequence
  misc_feature: DNAzyme
agcggcagggctagctacaacgatggccaag

SEQ ID NO: 5213 - DNA, 31 bp, artificial sequence
  misc_feature: DNAzyme
tggagcggggctagctacaacgaagctggcc

SEQ ID NO: 5214 - DNA, 31 bp, artificial sequence
  misc_feature: DNAzyme
caatggagggctagctacaacgaggcagctg

SEQ ID NO: 5215 - DNA, 31 bp, artificial sequence
  misc_feature: DNAzyme
cttgtcaaggctagctacaacgaggagcggc

SEQ ID NO: 5216 - DNA, 31 bp, artificial sequence
  misc_feature: DNAzyme
cgaacttgggctagctacaacgacaatggag

SEQ ID NO: 5217 - DNA, 31 bp, artificial sequence
  misc_feature: DNAzyme
tgagcgaaggctagctacaacgattgtcaat

SEQ ID NO: 5218 - DNA, 31 bp, artificial sequence
  misc_feature: DNAzyme
cccctgagggctagctacaacgagaacttgt

SEQ ID NO: 5219 - DNA, 31 bp, artificial sequence
  misc_feature: DNAzyme
ggaccccaggctagctacaacgaccctgagc

SEQ ID NO: 5220 - DNA, 31 bp, artificial sequence
  misc_feature: DNAzyme
tgataggaggctagctacaacgacccacccc

SEQ ID NO: 5221 - DNA, 31 bp, artificial sequence
  misc_feature: DNAzyme
gtaggtgaggctagctacaacgaaggacccc

SEQ ID NO: 5222 - DNA, 31 bp, artificial sequence
  misc_feature: DNAzyme
ggtgtaggggctagctacaacgagataggac

SEQ ID NO: 5223 - DNA, 31 bp, artificial sequence
  misc_feature: DNAzyme
cctcggtgggctagctacaacgaaggtgata

SEQ ID NO: 5224 - DNA, 31 bp, artificial sequence
  misc_feature: DNAzyme
gccctcggggctagctacaacgagtaggtga

SEQ ID NO: 5225 - DNA, 31 bp, artificial sequence
  misc_feature: DNAzyme
agttgtggggctagctacaacgacctcggtg

SEQ ID NO: 5226 - DNA, 31 bp, artificial sequence
  misc_feature: DNAzyme
ccgagttgggctagctacaacgaggccctcg

SEQ ID NO: 5227 - DNA, 31 bp, artificial sequence
  misc_feature: DNAzyme
ggtccgagggctagctacaacgatgtggccc

SEQ ID NO: 5228 - DNA, 31 bp, artificial sequence
  misc_feature: DNAzyme
gcctctggggctagctacaacgaccgagttg

SEQ ID NO: 5229 - DNA, 31 bp, artificial sequence
  misc_feature: DNAzyme
caatagggggctagctacaacgactctggtc

SEQ ID NO: 5230 - DNA, 31 bp, artificial sequence
  misc_feature: DNAzyme
gccagcaaggctagctacaacgaagggcctc

SEQ ID NO: 5231 - DNA, 31 bp, artificial sequence
  misc_feature: DNAzyme
agtgccagggctagctacaacgaaatagggc

SEQ ID NO: 5232 - DNA, 31 bp, artificial sequence
  misc_feature: DNAzyme
gcgtagtgggctagctacaacgacagcaata

SEQ ID NO: 5233 - DNA, 31 bp, artificial sequence
  misc_feature: DNAzyme
gtgcgtagggctagctacaacgagccagcaa

SEQ ID NO: 5234 - DNA, 31 bp, artificial sequence
  misc_feature: DNAzyme
gcggtgcgggctagctacaacgaagtgccag

SEQ ID NO: 5235 - DNA, 31 bp, artificial sequence
  misc_feature: DNAzyme
ccgcggtgggctagctacaacgagtagtgcc

SEQ ID NO: 5236 - DNA, 31 bp, artificial sequence
  misc_feature: DNAzyme
ggccgcggggctagctacaacgagcgtagtg

SEQ ID NO: 5237 - DNA, 31 bp, artificial sequence
  misc_feature: DNAzyme
cacggccgggctagctacaacgaggtgcgta

SEQ ID NO: 5238 - DNA, 31 bp, artificial sequence
  misc_feature: DNAzyme
ccacacggggctagctacaacgacgcggtgc

SEQ ID NO: 5239 - DNA, 31 bp, artificial sequence
  misc_feature: DNAzyme
ataccacaggctagctacaacgaggccgcgg

SEQ ID NO: 5240 - DNA, 31 bp, artificial sequence
  misc_feature: DNAzyme
cgataccaggctagctacaacgaacggccgc

SEQ ID NO: 5241 - DNA, 31 bp, artificial sequence
  misc_feature: DNAzyme
gtacgataggctagctacaacgacacacggc

SEQ ID NO: 5242 - DNA, 31 bp, artificial sequence
  misc_feature: DNAzyme
gggtacgaggctagctacaacgaaccacacg

SEQ ID NO: 5243 - DNA, 31 bp, artificial sequence
  misc_feature: DNAzyme
tgcgggtaggctagctacaacgagataccac

SEQ ID NO: 5244 - DNA, 31 bp, artificial sequence
  misc_feature: DNAzyme
gatgcgggggctagctacaacgaacgatacc

SEQ ID NO: 5245 - DNA, 31 bp, artificial sequence
  misc_feature: DNAzyme
ctgcgatgggctagctacaacgagggtacga

SEQ ID NO: 5246 - DNA, 31 bp, artificial sequence
  misc_feature: DNAzyme
acctgcgaggctagctacaacgagcgggtac

SEQ ID NO: 5247 - DNA, 31 bp, artificial sequence
  misc_feature: DNAzyme
catacctgggctagctacaacgagatgcggg

SEQ ID NO: 5248 - DNA, 31 bp, artificial sequence
  misc_feature: DNAzyme
accacataggctagctacaacgactgcgatg

SEQ ID NO: 5249 - DNA, 31 bp, artificial sequence
  misc_feature: DNAzyme
ggaccacaggctagctacaacgaacctgcga

SEQ ID NO: 5250 - DNA, 31 bp, artificial sequence
  misc_feature: DNAzyme
ctggaccaggctagctacaacgaatacctgc

SEQ ID NO: 5251 - DNA, 31 bp, artificial sequence
  misc_feature: DNAzyme
acactggaggctagctacaacgacacatacc

SEQ ID NO: 5252 - DNA, 31 bp, artificial sequence
  misc_feature: DNAzyme
gcaatacaggctagctacaacgatggaccac

SEQ ID NO: 5253 - DNA, 31 bp, artificial sequence
  misc_feature: DNAzyme
aagcaataggctagctacaacgaactggacc

SEQ ID NO: 5254 - DNA, 31 bp, artificial sequence
  misc_feature: DNAzyme
tgaagcaaggctagctacaacgaacactgga

SEQ ID NO: 5255 - DNA, 31 bp, artificial sequence
  misc_feature: DNAzyme
gggtgaagggctagctacaacgaaatacact

SEQ ID NO: 5256 - DNA, 31 bp, artificial sequence
  misc_feature: DNAzyme
gcttggggggctagctacaacgagaagcaat

SEQ ID NO: 5257 - DNA, 31 bp, artificial sequence
  misc_feature: DNAzyme
caacagggggctagctacaacgattggggtg

SEQ ID NO: 5258 - DNA, 31 bp, artificial sequence
  misc_feature: DNAzyme
caccacaaggctagctacaacgaagggcttg

SEQ ID NO: 5259 - DNA, 31 bp, artificial sequence
  misc_feature: DNAzyme
ccccaccaggctagctacaacgaaacagggc

SEQ ID NO: 5260 - DNA, 31 bp, artificial sequence
  misc_feature: DNAzyme
cgtccccaggctagctacaacgacacaacag

SEQ ID NO: 5261 - DNA, 31 bp, artificial sequence
  misc_feature: DNAzyme
gtcggtcgggctagctacaacgaccccacca

SEQ ID NO: 5262 - DNA, 31 bp, artificial sequence
  misc_feature: DNAzyme
acggtcggggctagctacaacgacgtcccca

SEQ ID NO: 5263 - DNA, 31 bp, artificial sequence
  misc_feature: DNAzyme
cgaaacggggctagctacaacgacggtcgtc

SEQ ID NO: 5264 - DNA, 31 bp, artificial sequence
  misc_feature: DNAzyme
cgccgaaaggctagctacaacgaggtcggtc

SEQ ID NO: 5265 - DNA, 31 bp, artificial sequence
  misc_feature: DNAzyme
tgggggcgggctagctacaacgacgaaacgg

SEQ ID NO: 5266 - DNA, 31 bp, artificial sequence
  misc_feature: DNAzyme
cgtgggggggctagctacaacgagccgaaac

SEQ ID NO: 5267 - DNA, 31 bp, artificial sequence
  misc_feature: DNAzyme
gttatacgggctagctacaacgagggggcgc

SEQ ID NO: 5268 - DNA, 31 bp, artificial sequence
  misc_feature: DNAzyme
cagttataggctagctacaacgagtgggggc

SEQ ID NO: 5269 - DNA, 31 bp, artificial sequence
  misc_feature: DNAzyme
cccagttaggctagctacaacgaacgtgggg

SEQ ID NO: 5270 - DNA, 31 bp, artificial sequence
  misc_feature: DNAzyme
ccccccagggctagctacaacgatatacgtg

SEQ ID NO: 5271 - DNA, 31 bp, artificial sequence
  misc_feature: DNAzyme
ctcgttcgggctagctacaacgacccccagt

SEQ ID NO: 5272 - DNA, 31 bp, artificial sequence
  misc_feature: DNAzyme
ccgtctcgggctagctacaacgatcgccccc

SEQ ID NO: 5273 - DNA, 31 bp, artificial sequence
  misc_feature: DNAzyme
cacgtccgggctagctacaacgactcgttcg

SEQ ID NO: 5274 - DNA, 31 bp, artificial sequence
  misc_feature: DNAzyme
gcagcacgggctagctacaacgaccgtctcg

SEQ ID NO: 5275 - DNA, 31 bp, artificial sequence
  misc_feature: DNAzyme
gagcagcaggctagctacaacgagtccgtct

SEQ ID NO: 5276 - DNA, 31 bp, artificial sequence
  misc_feature: DNAzyme
aggagcagggctagctacaacgaacgtccgt

SEQ ID NO: 5277 - DNA, 31 bp, artificial sequence
  misc_feature: DNAzyme
ttgaggagggctagctacaacgaagcacgtc

SEQ ID NO: 5278 - DNA, 31 bp, artificial sequence
  misc_feature: DNAzyme
gcgtgttgggctagctacaacgatgaggagc

SEQ ID NO: 5279 - DNA, 31 bp, artificial sequence
  misc_feature: DNAzyme
gccgcgtgggctagctacaacgatgttgagg

SEQ ID NO: 5280 - DNA, 31 bp, artificial sequence
  misc_feature: DNAzyme
cggccgcgggctagctacaacgagttgttga

SEQ ID NO: 5281 - DNA, 31 bp, artificial sequence
  misc_feature: DNAzyme
ggcggccgggctagctacaacgagtgttgtt

SEQ ID NO: 5282 - DNA, 31 bp, artificial sequence
  misc_feature: DNAzyme
tgcggcggggctagctacaacgacgcgtgtt

SEQ ID NO: 5283 - DNA, 31 bp, artificial sequence
  misc_feature: DNAzyme
ccttgcggggctagctacaacgaggccgcgt

SEQ ID NO: 5284 - DNA, 31 bp, artificial sequence
  misc_feature: DNAzyme
ttgccttgggctagctacaacgaggcggccg

SEQ ID NO: 5285 - DNA, 31 bp, artificial sequence
  misc_feature: DNAzyme
accagttgggctagctacaacgacttgcggc

SEQ ID NO: 5286 - DNA, 31 bp, artificial sequence
  misc_feature: DNAzyme
cgaaccagggctagctacaacgatgccttgc

SEQ ID NO: 5287 - DNA, 31 bp, artificial sequence
  misc_feature: DNAzyme
cagccgaaggctagctacaacgacagttgcc

SEQ ID NO: 5288 - DNA, 31 bp, artificial sequence
  misc_feature: DNAzyme
atgtgcagggctagctacaacgacgaaccag

SEQ ID NO: 5289 - DNA, 31 bp, artificial sequence
  misc_feature: DNAzyme
tccatgtgggctagctacaacgaagccgaac

SEQ ID NO: 5290 - DNA, 31 bp, artificial sequence
  misc_feature: DNAzyme
catccatgggctagctacaacgagcagccga

SEQ ID NO: 5291 - DNA, 31 bp, artificial sequence
  misc_feature: DNAzyme
ttcatccaggctagctacaacgagtgcagcc

SEQ ID NO: 5292 - DNA, 31 bp, artificial sequence
  misc_feature: DNAzyme
gccattcaggctagctacaacgaccatgtgc

SEQ ID NO: 5293 - DNA, 31 bp, artificial sequence
  misc_feature: DNAzyme
cagtgccaggctagctacaacgatcatccat

SEQ ID NO: 5294 - DNA, 31 bp, artificial sequence
  misc_feature: DNAzyme
acccagtgggctagctacaacgacattcatc

SEQ ID NO: 5295 - DNA, 31 bp, artificial sequence
  misc_feature: DNAzyme
gaacccagggctagctacaacgagccattca

SEQ ID NO: 5296 - DNA, 31 bp, artificial sequence
  misc_feature: DNAzyme
ttggtgaaggctagctacaacgaccagtgcc

SEQ ID NO: 5297 - DNA, 31 bp, artificial sequence
  misc_feature: DNAzyme
cgtcttggggctagctacaacgagaacccag

SEQ ID NO: 5298 - DNA, 31 bp, artificial sequence
  misc_feature: DNAzyme
cccgcacgggctagctacaacgacttggtga

SEQ ID NO: 5299 - DNA, 31 bp, artificial sequence
  misc_feature: DNAzyme
cccccgcaggctagctacaacgagtcttggt

SEQ ID NO: 5300 - DNA, 31 bp, artificial sequence
  misc_feature: DNAzyme
ggcccccgggctagctacaacgaacgtcttg

SEQ ID NO: 5301 - DNA, 31 bp, artificial sequence
  misc_feature: DNAzyme
acggggggggctagctacaacgaccccgcac

SEQ ID NO: 5302 - DNA, 31 bp, artificial sequence
  misc_feature: DNAzyme
atgttgcaggctagctacaacgaggggggcc

SEQ ID NO: 5303 - DNA, 31 bp, artificial sequence
  misc_feature: DNAzyme
cgatgttgggctagctacaacgaacgggggg

SEQ ID NO: 5304 - DNA, 31 bp, artificial sequence
  misc_feature: DNAzyme
ccccgatgggctagctacaacgatgcacggg

SEQ ID NO: 5305 - DNA, 31 bp, artificial sequence
  misc_feature: DNAzyme
ccccccgaggctagctacaacgagttgcacg

SEQ ID NO: 5306 - DNA, 31 bp, artificial sequence
  misc_feature: DNAzyme
gttaccggggctagctacaacgaccccccga

SEQ ID NO: 5307 - DNA, 31 bp, artificial sequence
  misc_feature: DNAzyme
tgtcgttaggctagctacaacgacggccccc

SEQ ID NO: 5308 - DNA, 31 bp, artificial sequence
  misc_feature: DNAzyme
aggtgtcgggctagctacaacgataccggcc

SEQ ID NO: 5309 - DNA, 31 bp, artificial sequence
  misc_feature: DNAzyme
ttaaggtgggctagctacaacgacgttaccg

SEQ ID NO: 5310 - DNA, 31 bp, artificial sequence
  misc_feature: DNAzyme
ggttaaggggctagctacaacgagtcgttac

SEQ ID NO: 5311 - DNA, 31 bp, artificial sequence
  misc_feature: DNAzyme
ggggcaggggctagctacaacgataaggtgt

SEQ ID NO: 5312 - DNA, 31 bp, artificial sequence
  misc_feature: DNAzyme
ccgtggggggctagctacaacgaaggttaag

SEQ ID NO: 5313 - DNA, 31 bp, artificial sequence
  misc_feature: DNAzyme
gcagtccgggctagctacaacgaggggcagg

SEQ ID NO: 5314 - DNA, 31 bp, artificial sequence
  misc_feature: DNAzyme
ggaagcagggctagctacaacgaccgtgggg

SEQ ID NO: 5315 - DNA, 31 bp, artificial sequence
  misc_feature: DNAzyme
tccggaagggctagctacaacgaagtccgtg

SEQ ID NO: 5316 - DNA, 31 bp, artificial sequence
  misc_feature: DNAzyme
tcggggtgggctagctacaacgattccggaa

SEQ ID NO: 5317 - DNA, 31 bp, artificial sequence
  misc_feature: DNAzyme
cctcggggggctagctacaacgagcttccgg

SEQ ID NO: 5318 - DNA, 31 bp, artificial sequence
  misc_feature: DNAzyme
gtaagtggggctagctacaacgactcggggt

SEQ ID NO: 5319 - DNA, 31 bp, artificial sequence
  misc_feature: DNAzyme
tgcgtaagggctagctacaacgaggcctcgg

SEQ ID NO: 5320 - DNA, 31 bp, artificial sequence
  misc_feature: DNAzyme
actttgcgggctagctacaacgaaagtggcc

SEQ ID NO: 5321 - DNA, 31 bp, artificial sequence
  misc_feature: DNAzyme
gcactttgggctagctacaacgagtaagtgg

SEQ ID NO: 5322 - DNA, 31 bp, artificial sequence
  misc_feature: DNAzyme
gaaccgcaggctagctacaacgatttgcgta

SEQ ID NO: 5323 - DNA, 31 bp, artificial sequence
  misc_feature: DNAzyme
ccgaaccgggctagctacaacgaactttgcg

SEQ ID NO: 5324 - DNA, 31 bp, artificial sequence
  misc_feature: DNAzyme
gccccgaaggctagctacaacgacgcacttt

SEQ ID NO: 5325 - DNA, 31 bp, artificial sequence
  misc_feature: DNAzyme
aaccaaggggctagctacaacgacccgaacc

SEQ ID NO: 5326 - DNA, 31 bp, artificial sequence
  misc_feature: DNAzyme
ggtgttaaggctagctacaacgacaaggccc

SEQ ID NO: 5327 - DNA, 31 bp, artificial sequence
  misc_feature: DNAzyme
tctaggtgggctagctacaacgataaccaag

SEQ ID NO: 5328 - DNA, 31 bp, artificial sequence
  misc_feature: DNAzyme
catctaggggctagctacaacgagttaacca

SEQ ID NO: 5329 - DNA, 31 bp, artificial sequence
  misc_feature: DNAzyme
actatgcaggctagctacaacgactaggtgt

SEQ ID NO: 5330 - DNA, 31 bp, artificial sequence
  misc_feature: DNAzyme
caactatgggctagctacaacgaatctaggt

SEQ ID NO: 5331 - DNA, 31 bp, artificial sequence
  misc_feature: DNAzyme
gtcaactaggctagctacaacgagcatctag

SEQ ID NO: 5332 - DNA, 31 bp, artificial sequence
  misc_feature: DNAzyme
gtagtcaaggctagctacaacgatatgcatc

SEQ ID NO: 5333 - DNA, 31 bp, artificial sequence
  misc_feature: DNAzyme
atgggtagggctagctacaacgacaactatg

SEQ ID NO: 5334 - DNA, 31 bp, artificial sequence
  misc_feature: DNAzyme
tgtatgggggctagctacaacgaagtcaact

SEQ ID NO: 5335 - DNA, 31 bp, artificial sequence
  misc_feature: DNAzyme
agcctgtaggctagctacaacgagggtagtc

SEQ ID NO: 5336 - DNA, 31 bp, artificial sequence
  misc_feature: DNAzyme
aaagcctgggctagctacaacgaatgggtag

SEQ ID NO: 5337 - DNA, 31 bp, artificial sequence
  misc_feature: DNAzyme
tgccaaagggctagctacaacgactgtatgg

SEQ ID NO: 5338 - DNA, 31 bp, artificial sequence
  misc_feature: DNAzyme
gggtagtgggctagctacaacgacaaagcct

SEQ ID NO: 5339 - DNA, 31 bp, artificial sequence
  misc_feature: DNAzyme
aggggtagggctagctacaacgagccaaagc

SEQ ID NO: 5340 - DNA, 31 bp, artificial sequence
  misc_feature: DNAzyme
tgcaggggggctagctacaacgaagtgccaa

SEQ ID NO: 5341 - DNA, 31 bp, artificial sequence
  misc_feature: DNAzyme
tgacagtgggctagctacaacgaaggggtag

SEQ ID NO: 5342 - DNA, 31 bp, artificial sequence
  misc_feature: DNAzyme
attgacagggctagctacaacgagcaggggt

SEQ ID NO: 5343 - DNA, 31 bp, artificial sequence
  misc_feature: DNAzyme
aaaattgaggctagctacaacgaagtgcagg

SEQ ID NO: 5344 - DNA, 31 bp, artificial sequence
  misc_feature: DNAzyme
tggaaaaaggctagctacaacgatgacagtg

SEQ ID NO: 5345 - DNA, 31 bp, artificial sequence
  misc_feature: DNAzyme
cttaaagaggctagctacaacgaggaaaaat

SEQ ID NO: 5346 - DNA, 31 bp, artificial sequence
  misc_feature: DNAzyme
catcctaaggctagctacaacgacttaaaga

SEQ ID NO: 5347 - DNA, 31 bp, artificial sequence
  misc_feature: DNAzyme
cacatacaggctagctacaacgacctaacct

SEQ ID NO: 5348 - DNA, 31 bp, artificial sequence
  misc_feature: DNAzyme
cccacataggctagctacaacgaatcctaac

SEQ ID NO: 5349 - DNA, 31 bp, artificial sequence
  misc_feature: DNAzyme
cccccacaggctagctacaacgaacatccta

SEQ ID NO: 5350 - DNA, 31 bp, artificial sequence
  misc_feature: DNAzyme
gccccccaggctagctacaacgaatacatcc

SEQ ID NO: 5351 - DNA, 31 bp, artificial sequence
  misc_feature: DNAzyme
gctccacgggctagctacaacgacccccaca

SEQ ID NO: 5352 - DNA, 31 bp, artificial sequence
  misc_feature: DNAzyme
gtgctccaggctagctacaacgagcccccca

SEQ ID NO: 5353 - DNA, 31 bp, artificial sequence
  misc_feature: DNAzyme
agcctgtgggctagctacaacgatccacgcc

SEQ ID NO: 5354 - DNA, 31 bp, artificial sequence
  misc_feature: DNAzyme
tgagcctgggctagctacaacgagctccacg

SEQ ID NO: 5355 - DNA, 31 bp, artificial sequence
  misc_feature: DNAzyme
gcggtgagggctagctacaacgactgtgctc

SEQ ID NO: 5356 - DNA, 31 bp, artificial sequence
  misc_feature: DNAzyme
tgcggcggggctagctacaacgagagcctgt

SEQ ID NO: 5357 - DNA, 31 bp, artificial sequence
  misc_feature: DNAzyme
gcatgcggggctagctacaacgaggtgagcc

SEQ ID NO: 5358 - DNA, 31 bp, artificial sequence
  misc_feature: DNAzyme
attgcatgggctagctacaacgaggcggtga

SEQ ID NO: 5359 - DNA, 31 bp, artificial sequence
  misc_feature: DNAzyme
caattgcaggctagctacaacgagcggcggt

SEQ ID NO: 5360 - DNA, 31 bp, artificial sequence
  misc_feature: DNAzyme
tccaattgggctagctacaacgaatgcggcg

SEQ ID NO: 5361 - DNA, 31 bp, artificial sequence
  misc_feature: DNAzyme
gagtccaaggctagctacaacgatgcatgcg

SEQ ID NO: 5362 - DNA, 31 bp, artificial sequence
  misc_feature: DNAzyme
tcctcgagggctagctacaacgaccaattgc

SEQ ID NO: 5363 - DNA, 31 bp, artificial sequence
  misc_feature: DNAzyme
tcacaacgggctagctacaacgatctcctcg

SEQ ID NO: 5364 - DNA, 31 bp, artificial sequence
  misc_feature: DNAzyme
aatcacaaggctagctacaacgagctctcct

SEQ ID NO: 5365 - DNA, 31 bp, artificial sequence
  misc_feature: DNAzyme
ccaaatcaggctagctacaacgaaacgctct

SEQ ID NO: 5366 - DNA, 31 bp, artificial sequence
  misc_feature: DNAzyme
cctccaaaggctagctacaacgacacaacgc

SEQ ID NO: 5367 - DNA, 31 bp, artificial sequence
  misc_feature: DNAzyme
tgtccctgggctagctacaacgacctccaaa

SEQ ID NO: 5368 - DNA, 31 bp, artificial sequence
  misc_feature: DNAzyme
ctgatctgggctagctacaacgaccctgtcc

SEQ ID NO: 5369 - DNA, 31 bp, artificial sequence
  misc_feature: DNAzyme
agctctgaggctagctacaacgactgtccct

SEQ ID NO: 5370 - DNA, 31 bp, artificial sequence
  misc_feature: DNAzyme
gggctgagggctagctacaacgatctgatct

SEQ ID NO: 5371 - DNA, 31 bp, artificial sequence
  misc_feature: DNAzyme
gcagcgggggctagctacaacgatgagctct

SEQ ID NO: 5372 - DNA, 31 bp, artificial sequence
  misc_feature: DNAzyme
aacagcagggctagctacaacgagggctgag

SEQ ID NO: 5373 - DNA, 31 bp, artificial sequence
  misc_feature: DNAzyme
gacaacagggctagctacaacgaagcgggct

SEQ ID NO: 5374 - DNA, 31 bp, artificial sequence
  misc_feature: DNAzyme
gtggacaaggctagctacaacgaagcagcgg

SEQ ID NO: 5375 - DNA, 31 bp, artificial sequence
  misc_feature: DNAzyme
gtagtggaggctagctacaacgaaacagcag

SEQ ID NO: 5376 - DNA, 31 bp, artificial sequence
  misc_feature: DNAzyme
ctctgtagggctagctacaacgaggacaaca

SEQ ID NO: 5377 - DNA, 31 bp, artificial sequence
  misc_feature: DNAzyme
ccactctgggctagctacaacgaagtggaca

SEQ ID NO: 5378 - DNA, 31 bp, artificial sequence
  misc_feature: DNAzyme
atttgccaggctagctacaacgatctgtagt

SEQ ID NO: 5379 - DNA, 31 bp, artificial sequence
  misc_feature: DNAzyme
agtatttgggctagctacaacgacactctgt

SEQ ID NO: 5380 - DNA, 31 bp, artificial sequence
  misc_feature: DNAzyme
gggcagtaggctagctacaacgattgccact

SEQ ID NO: 5381 - DNA, 31 bp, artificial sequence
  misc_feature: DNAzyme
cagggcagggctagctacaacgaatttgcca

SEQ ID NO: 5382 - DNA, 31 bp, artificial sequence
  misc_feature: DNAzyme
gagcagggggctagctacaacgaagtatttg

SEQ ID NO: 5383 - DNA, 31 bp, artificial sequence
  misc_feature: DNAzyme
tgaaggagggctagctacaacgaagggcagt

SEQ ID NO: 5384 - DNA, 31 bp, artificial sequence
  misc_feature: DNAzyme
tagggtggggctagctacaacgagaaggagc

SEQ ID NO: 5385 - DNA, 31 bp, artificial sequence
  misc_feature: DNAzyme
cggtagggggctagctacaacgaggtgaagg

SEQ ID NO: 5386 - DNA, 31 bp, artificial sequence
  misc_feature: DNAzyme
agagccggggctagctacaacgaagggtggt

SEQ ID NO: 5387 - DNA, 31 bp, artificial sequence
  misc_feature: DNAzyme
ggacagagggctagctacaacgacggtaggg

SEQ ID NO: 5388 - DNA, 31 bp, artificial sequence
  misc_feature: DNAzyme
ccagtggaggctagctacaacgaagagccgg

SEQ ID NO: 5389 - DNA, 31 bp, artificial sequence
  misc_feature: DNAzyme
caaaccagggctagctacaacgaggacagag

SEQ ID NO: 5390 - DNA, 31 bp, artificial sequence
  misc_feature: DNAzyme
ggatcaaaggctagctacaacgacagtggac

SEQ ID NO: 5391 - DNA, 31 bp, artificial sequence
  misc_feature: DNAzyme
gagatggaggctagctacaacgacaaaccag

SEQ ID NO: 5392 - DNA, 31 bp, artificial sequence
  misc_feature: DNAzyme
ggtggagaggctagctacaacgaggatcaaa

SEQ ID NO: 5393 - DNA, 31 bp, artificial sequence
  misc_feature: DNAzyme
tgttctggggctagctacaacgaggagatgg

SEQ ID NO: 5394 - DNA, 31 bp, artificial sequence
  misc_feature: DNAzyme
ccacgatgggctagctacaacgatctggtgg

SEQ ID NO: 5395 - DNA, 31 bp, artificial sequence
  misc_feature: DNAzyme
gtccacgaggctagctacaacgagttctggt

SEQ ID NO: 5396 - DNA, 31 bp, artificial sequence
  misc_feature: DNAzyme
cacgtccaggctagctacaacgagatgttct

SEQ ID NO: 5397 - DNA, 31 bp, artificial sequence
  misc_feature: DNAzyme
attgcacgggctagctacaacgaccacgatg

SEQ ID NO: 5398 - DNA, 31 bp, artificial sequence
  misc_feature: DNAzyme
gtattgcaggctagctacaacgagtccacga

SEQ ID NO: 5399 - DNA, 31 bp, artificial sequence
  misc_feature: DNAzyme
aggtattgggctagctacaacgaacgtccac

SEQ ID NO: 5400 - DNA, 31 bp, artificial sequence
  misc_feature: DNAzyme
tacaggtaggctagctacaacgatgcacgtc

SEQ ID NO: 5401 - DNA, 31 bp, artificial sequence
  misc_feature: DNAzyme
cgtacaggggctagctacaacgaattgcacg

SEQ ID NO: 5402 - DNA, 31 bp, artificial sequence
  misc_feature: DNAzyme
acaccgtaggctagctacaacgaaggtattg

SEQ ID NO: 5403 - DNA, 31 bp, artificial sequence
  misc_feature: DNAzyme
ctacaccgggctagctacaacgaacaggtat

SEQ ID NO: 5404 - DNA, 31 bp, artificial sequence
  misc_feature: DNAzyme
accctacaggctagctacaacgacgtacagg

SEQ ID NO: 5405 - DNA, 31 bp, artificial sequence
  misc_feature: DNAzyme
tgaccctaggctagctacaacgaaccgtaca

SEQ ID NO: 5406 - DNA, 31 bp, artificial sequence
  misc_feature: DNAzyme
accgctgaggctagctacaacgacctacacc

SEQ ID NO: 5407 - DNA, 31 bp, artificial sequence
  misc_feature: DNAzyme
gacaaccgggctagctacaacgatgacccta

SEQ ID NO: 5408 - DNA, 31 bp, artificial sequence
  misc_feature: DNAzyme
ggagacaaggctagctacaacgacgctgacc

SEQ ID NO: 5409 - DNA, 31 bp, artificial sequence
  misc_feature: DNAzyme
gaaggagaggctagctacaacgaaaccgctg

SEQ ID NO: 5410 - DNA, 31 bp, artificial sequence
  misc_feature: DNAzyme
tttgattgggctagctacaacgagaaggaga

SEQ ID NO: 5411 - DNA, 31 bp, artificial sequence
  misc_feature: DNAzyme
ccatttgaggctagctacaacgatgcgaagg

SEQ ID NO: 5412 - DNA, 31 bp, artificial sequence
  misc_feature: DNAzyme
tactcccaggctagctacaacgattgattgc

SEQ ID NO: 5413 - DNA, 31 bp, artificial sequence
  misc_feature: DNAzyme
aggacataggctagctacaacgatcccattt

SEQ ID NO: 5414 - DNA, 31 bp, artificial sequence
  misc_feature: DNAzyme
acaggacaggctagctacaacgaactcccat

SEQ ID NO: 5415 - DNA, 31 bp, artificial sequence
  misc_feature: DNAzyme
caacaggaggctagctacaacgaatactccc

SEQ ID NO: 5416 - DNA, 31 bp, artificial sequence
  misc_feature: DNAzyme
aaaagcaaggctagctacaacgaaggacata

SEQ ID NO: 5417 - DNA, 31 bp, artificial sequence
  misc_feature: DNAzyme
aggaaaagggctagctacaacgaaacaggac

SEQ ID NO: 5418 - DNA, 31 bp, artificial sequence
  misc_feature: DNAzyme
cgcgtctgggctagctacaacgacaggagaa

SEQ ID NO: 5419 - DNA, 31 bp, artificial sequence
  misc_feature: DNAzyme
cgcgcgcgggctagctacaacgactgccagg

SEQ ID NO: 5420 - DNA, 31 bp, artificial sequence
  misc_feature: DNAzyme
gacgcgcgggctagctacaacgagtctgcca

SEQ ID NO: 5421 - DNA, 31 bp, artificial sequence
  misc_feature: DNAzyme
cagacgcgggctagctacaacgagcgtctgc

SEQ ID NO: 5422 - DNA, 31 bp, artificial sequence
  misc_feature: DNAzyme
cacagacgggctagctacaacgagcgcgtct

SEQ ID NO: 5423 - DNA, 31 bp, artificial sequence
  misc_feature: DNAzyme
ggcacagaggctagctacaacgagcgcgcgt

SEQ ID NO: 5424 - DNA, 31 bp, artificial sequence
  misc_feature: DNAzyme
aacaggcaggctagctacaacgaagacgcgc

SEQ ID NO: 5425 - DNA, 31 bp, artificial sequence
  misc_feature: DNAzyme
caaacaggggctagctacaacgaacagacgc

SEQ ID NO: 5426 - DNA, 31 bp, artificial sequence
  misc_feature: DNAzyme
tccacaaaggctagctacaacgaaggcacag

SEQ ID NO: 5427 - DNA, 31 bp, artificial sequence
  misc_feature: DNAzyme
atcatccaggctagctacaacgaaaacaggc

SEQ ID NO: 5428 - DNA, 31 bp, artificial sequence
  misc_feature: DNAzyme
cagcatcaggctagctacaacgaccacaaac

SEQ ID NO: 5429 - DNA, 31 bp, artificial sequence
  misc_feature: DNAzyme
caacagcaggctagctacaacgacatccaca

SEQ ID NO: 5430 - DNA, 31 bp, artificial sequence
  misc_feature: DNAzyme
accaacagggctagctacaacgaatcatcca

SEQ ID NO: 5431 - DNA, 31 bp, artificial sequence
  misc_feature: DNAzyme
gctaccaaggctagctacaacgaagcatcat

SEQ ID NO: 5432 - DNA, 31 bp, artificial sequence
  misc_feature: DNAzyme
ctgggctaggctagctacaacgacaacagca

SEQ ID NO: 5433 - DNA, 31 bp, artificial sequence
  misc_feature: DNAzyme
ggcctgggggctagctacaacgataccaaca

SEQ ID NO: 5434 - DNA, 31 bp, artificial sequence
  misc_feature: DNAzyme
agcctcggggctagctacaacgactgggcta

SEQ ID NO: 5435 - DNA, 31 bp, artificial sequence
  misc_feature: DNAzyme
tagggcagggctagctacaacgactcggcct

SEQ ID NO: 5436 - DNA, 31 bp, artificial sequence
  misc_feature: DNAzyme
ctctagggggctagctacaacgaagcctcgg

SEQ ID NO: 5437 - DNA, 31 bp, artificial sequence
  misc_feature: DNAzyme
ccaccaggggctagctacaacgatctctagg

SEQ ID NO: 5438 - DNA, 31 bp, artificial sequence
  misc_feature: DNAzyme
gaggaccaggctagctacaacgacaggttct

SEQ ID NO: 5439 - DNA, 31 bp, artificial sequence
  misc_feature: DNAzyme
attgaggaggctagctacaacgacaccaggt

SEQ ID NO: 5440 - DNA, 31 bp, artificial sequence
  misc_feature: DNAzyme
atgctgcaggctagctacaacgatgaggacc

SEQ ID NO: 5441 - DNA, 31 bp, artificial sequence
  misc_feature: DNAzyme
ggatgctgggctagctacaacgaattgagga

SEQ ID NO: 5442 - DNA, 31 bp, artificial sequence
  misc_feature: DNAzyme
caaggatgggctagctacaacgatgcattga

SEQ ID NO: 5443 - DNA, 31 bp, artificial sequence
  misc_feature: DNAzyme
gccaaggaggctagctacaacgagctgcatt

SEQ ID NO: 5444 - DNA, 31 bp, artificial sequence
  misc_feature: DNAzyme
cactccggggctagctacaacgacaaggatg

SEQ ID NO: 5445 - DNA, 31 bp, artificial sequence
  misc_feature: DNAzyme
gccatgcaggctagctacaacgatccggcca

SEQ ID NO: 5446 - DNA, 31 bp, artificial sequence
  misc_feature: DNAzyme
atgccatgggctagctacaacgaactccggc

SEQ ID NO: 5447 - DNA, 31 bp, artificial sequence
  misc_feature: DNAzyme
ggatgccaggctagctacaacgagcactccg

SEQ ID NO: 5448 - DNA, 31 bp, artificial sequence
  misc_feature: DNAzyme
agaggatgggctagctacaacgacatgcact

SEQ ID NO: 5449 - DNA, 31 bp, artificial sequence
  misc_feature: DNAzyme
ggagaggaggctagctacaacgagccatgca

SEQ ID NO: 5450 - DNA, 31 bp, artificial sequence
  misc_feature: DNAzyme
gaagaacaggctagctacaacgagaggaagg

SEQ ID NO: 5451 - DNA, 31 bp, artificial sequence
  misc_feature: DNAzyme
cagaagaaggctagctacaacgaacgaggaa

SEQ ID NO: 5452 - DNA, 31 bp, artificial sequence
  misc_feature: DNAzyme
aggcagcaggctagctacaacgaagaagaac

SEQ ID NO: 5453 - DNA, 31 bp, artificial sequence
  misc_feature: DNAzyme
ccaggcagggctagctacaacgaacagaaga

SEQ ID NO: 5454 - DNA, 31 bp, artificial sequence
  misc_feature: DNAzyme
gtaccaggggctagctacaacgaagcacaga

SEQ ID NO: 5455 - DNA, 31 bp, artificial sequence
  misc_feature: DNAzyme
ttgatgtaggctagctacaacgacaggcagc

SEQ ID NO: 5456 - DNA, 31 bp, artificial sequence
  misc_feature: DNAzyme
ctttgatgggctagctacaacgaaccaggca

SEQ ID NO: 5457 - DNA, 31 bp, artificial sequence
  misc_feature: DNAzyme
gcctttgaggctagctacaacgagtaccagg

SEQ ID NO: 5458 - DNA, 31 bp, artificial sequence
  misc_feature: DNAzyme
ccagcttgggctagctacaacgactttgatg

SEQ ID NO: 5459 - DNA, 31 bp, artificial sequence
  misc_feature: DNAzyme
gggaccagggctagctacaacgattgccttt

SEQ ID NO: 5460 - DNA, 31 bp, artificial sequence
  misc_feature: DNAzyme
cccagggaggctagctacaacgacagcttgc

SEQ ID NO: 5461 - DNA, 31 bp, artificial sequence
  misc_feature: DNAzyme
atatgccgggctagctacaacgacccaggga

SEQ ID NO: 5462 - DNA, 31 bp, artificial sequence
  misc_feature: DNAzyme
agcatatgggctagctacaacgacgccccag

SEQ ID NO: 5463 - DNA, 31 bp, artificial sequence
  misc_feature: DNAzyme
agagcataggctagctacaacgagccgcccc

SEQ ID NO: 5464 - DNA, 31 bp, artificial sequence
  misc_feature: DNAzyme
agagagcaggctagctacaacgaatgccgcc

SEQ ID NO: 5465 - DNA, 31 bp, artificial sequence
  misc_feature: DNAzyme
gtagagagggctagctacaacgaatatgccg

SEQ ID NO: 5466 - DNA, 31 bp, artificial sequence
  misc_feature: DNAzyme
atacgccgggctagctacaacgaagagagca

SEQ ID NO: 5467 - DNA, 31 bp, artificial sequence
  misc_feature: DNAzyme
gccatacgggctagctacaacgacgtagaga

SEQ ID NO: 5468 - DNA, 31 bp, artificial sequence
  misc_feature: DNAzyme
cggccataggctagctacaacgagccgtaga

SEQ ID NO: 5469 - DNA, 31 bp, artificial sequence
  misc_feature: DNAzyme
agcggccaggctagctacaacgaacgccgta

SEQ ID NO: 5470 - DNA, 31 bp, artificial sequence
  misc_feature: DNAzyme
agtagcggggctagctacaacgacatacgcc

SEQ ID NO: 5471 - DNA, 31 bp, artificial sequence
  misc_feature: DNAzyme
aggagtagggctagctacaacgaggccatac

SEQ ID NO: 5472 - DNA, 31 bp, artificial sequence
  misc_feature: DNAzyme
agcaggagggctagctacaacgaagcggcca

SEQ ID NO: 5473 - DNA, 31 bp, artificial sequence
  misc_feature: DNAzyme
agcaggagggctagctacaacgaaggagtag

SEQ ID NO: 5474 - DNA, 31 bp, artificial sequence
  misc_feature: DNAzyme
aacgccagggctagctacaacgaaggagcag

SEQ ID NO: 5475 - DNA, 31 bp, artificial sequence
  misc_feature: DNAzyme
tggtaacgggctagctacaacgacagcagga

SEQ ID NO: 5476 - DNA, 31 bp, artificial sequence
  misc_feature: DNAzyme
ggtggtaaggctagctacaacgagccagcag

SEQ ID NO: 5477 - DNA, 31 bp, artificial sequence
  misc_feature: DNAzyme
cgtggtggggctagctacaacgaaacgccag

SEQ ID NO: 5478 - DNA, 31 bp, artificial sequence
  misc_feature: DNAzyme
gcccgtggggctagctacaacgaggtaacgc

SEQ ID NO: 5479 - DNA, 31 bp, artificial sequence
  misc_feature: DNAzyme
tacgcccgggctagctacaacgaggtggtaa

SEQ ID NO: 5480 - DNA, 31 bp, artificial sequence
  misc_feature: DNAzyme
ggcgtacgggctagctacaacgaccgtggtg

SEQ ID NO: 5481 - DNA, 31 bp, artificial sequence
  misc_feature: DNAzyme
atggcgtaggctagctacaacgagcccgtgg

SEQ ID NO: 5482 - DNA, 31 bp, artificial sequence
  misc_feature: DNAzyme
ccatggcgggctagctacaacgaacgcccgt

SEQ ID NO: 5483 - DNA, 31 bp, artificial sequence
  misc_feature: DNAzyme
gtccatggggctagctacaacgagtacgccc

SEQ ID NO: 5484 - DNA, 31 bp, artificial sequence
  misc_feature: DNAzyme
ccggtccaggctagctacaacgaggcgtacg

SEQ ID NO: 5485 - DNA, 31 bp, artificial sequence
  misc_feature: DNAzyme
tctcccggggctagctacaacgaccatggcg

SEQ ID NO: 5486 - DNA, 31 bp, artificial sequence
  misc_feature: DNAzyme
tgcggccaggctagctacaacgactcccggt

SEQ ID NO: 5487 - DNA, 31 bp, artificial sequence
  misc_feature: DNAzyme
cgatgcggggctagctacaacgacatctccc

SEQ ID NO: 5488 - DNA, 31 bp, artificial sequence
  misc_feature: DNAzyme
gcacgatgggctagctacaacgaggccatct

SEQ ID NO: 5489 - DNA, 31 bp, artificial sequence
  misc_feature: DNAzyme
ccgcacgaggctagctacaacgagcggccat

SEQ ID NO: 5490 - DNA, 31 bp, artificial sequence
  misc_feature: DNAzyme
cctccgcaggctagctacaacgagatgcggc

SEQ ID NO: 5491 - DNA, 31 bp, artificial sequence
  misc_feature: DNAzyme
cgcctccgggctagctacaacgaacgatgcg

SEQ ID NO: 5492 - DNA, 31 bp, artificial sequence
  misc_feature: DNAzyme
aaaccacgggctagctacaacgactccgcac

SEQ ID NO: 5493 - DNA, 31 bp, artificial sequence
  misc_feature: DNAzyme
aaaaaccaggctagctacaacgagcctccgc

SEQ ID NO: 5494 - DNA, 31 bp, artificial sequence
  misc_feature: DNAzyme
tacaaaaaggctagctacaacgacacgcctc

SEQ ID NO: 5495 - DNA, 31 bp, artificial sequence
  misc_feature: DNAzyme
tagacctaggctagctacaacgaaaaaacca

SEQ ID NO: 5496 - DNA, 31 bp, artificial sequence
  misc_feature: DNAzyme
gtgctagaggctagctacaacgactacaaaa

SEQ ID NO: 5497 - DNA, 31 bp, artificial sequence
  misc_feature: DNAzyme
caagagtgggctagctacaacgatagaccta

SEQ ID NO: 5498 - DNA, 31 bp, artificial sequence
  misc_feature: DNAzyme
gtcaagagggctagctacaacgagctagacc

SEQ ID NO: 5499 - DNA, 31 bp, artificial sequence
  misc_feature: DNAzyme
tgacaaggggctagctacaacgacaagagtg

SEQ ID NO: 5500 - DNA, 31 bp, artificial sequence
  misc_feature: DNAzyme
tatggtgaggctagctacaacgaaaggtcaa

SEQ ID NO: 5501 - DNA, 31 bp, artificial sequence
  misc_feature: DNAzyme
tagtatggggctagctacaacgagacaaggt

SEQ ID NO: 5502 - DNA, 31 bp, artificial sequence
  misc_feature: DNAzyme
ttgtagtaggctagctacaacgaggtgacaa

SEQ ID NO: 5503 - DNA, 31 bp, artificial sequence
  misc_feature: DNAzyme
ctttgtagggctagctacaacgaatggtgac

SEQ ID NO: 5504 - DNA, 31 bp, artificial sequence
  misc_feature: DNAzyme
acactttgggctagctacaacgaagtatggt

SEQ ID NO: 5505 - DNA, 31 bp, artificial sequence
  misc_feature: DNAzyme
gaggaacaggctagctacaacgatttgtagt

SEQ ID NO: 5506 - DNA, 31 bp, artificial sequence
  misc_feature: DNAzyme
gcgaggaaggctagctacaacgaactttgta

SEQ ID NO: 5507 - DNA, 31 bp, artificial sequence
  misc_feature: DNAzyme
gagcctagggctagctacaacgagaggaaca

SEQ ID NO: 5508 - DNA, 31 bp, artificial sequence
  misc_feature: DNAzyme
catatgagggctagctacaacgactagcgag

SEQ ID NO: 5509 - DNA, 31 bp, artificial sequence
  misc_feature: DNAzyme
ccaccataggctagctacaacgagagcctag

SEQ ID NO: 5510 - DNA, 31 bp, artificial sequence
  misc_feature: DNAzyme
aaccaccaggctagctacaacgaatgagcct

SEQ ID NO: 5511 - DNA, 31 bp, artificial sequence
  misc_feature: DNAzyme
tgcaaccaggctagctacaacgacatatgag

SEQ ID NO: 5512 - DNA, 31 bp, artificial sequence
  misc_feature: DNAzyme
tattgcaaggctagctacaacgacaccatat

SEQ ID NO: 5513 - DNA, 31 bp, artificial sequence
  misc_feature: DNAzyme
aggtattgggctagctacaacgaaaccacca

SEQ ID NO: 5514 - DNA, 31 bp, artificial sequence
  misc_feature: DNAzyme
ataaggtaggctagctacaacgatgcaacca

SEQ ID NO: 5515 - DNA, 31 bp, artificial sequence
  misc_feature: DNAzyme
tgataaggggctagctacaacgaattgcaac

SEQ ID NO: 5516 - DNA, 31 bp, artificial sequence
  misc_feature: DNAzyme
tctggtgaggctagctacaacgaaaggtatt

SEQ ID NO: 5517 - DNA, 31 bp, artificial sequence
  misc_feature: DNAzyme
ggctctggggctagctacaacgagataaggt

SEQ ID NO: 5518 - DNA, 31 bp, artificial sequence
  misc_feature: DNAzyme
cgcctcggggctagctacaacgatctggtga

SEQ ID NO: 5519 - DNA, 31 bp, artificial sequence
  misc_feature: DNAzyme
caactgcgggctagctacaacgactcggctc

SEQ ID NO: 5520 - DNA, 31 bp, artificial sequence
  misc_feature: DNAzyme
tgcaactgggctagctacaacgagcctcggc

SEQ ID NO: 5521 - DNA, 31 bp, artificial sequence
  misc_feature: DNAzyme
acttgcaaggctagctacaacgatgcgcctc

SEQ ID NO: 5522 - DNA, 31 bp, artificial sequence
  misc_feature: DNAzyme
cacacttgggctagctacaacgaaactgcgc

SEQ ID NO: 5523 - DNA, 31 bp, artificial sequence
  misc_feature: DNAzyme
gatccacaggctagctacaacgattgcaact

SEQ ID NO: 5524 - DNA, 31 bp, artificial sequence
  misc_feature: DNAzyme
gggatccaggctagctacaacgaacttgcaa

SEQ ID NO: 5525 - DNA, 31 bp, artificial sequence
  misc_feature: DNAzyme
gggggggaggctagctacaacgaccacactt

SEQ ID NO: 5526 - DNA, 31 bp, artificial sequence
  misc_feature: DNAzyme
cccgaacgggctagctacaacgatgaggggg

SEQ ID NO: 5527 - DNA, 31 bp, artificial sequence
  misc_feature: DNAzyme
cccccgaaggctagctacaacgagttgaggg

SEQ ID NO: 5528 - DNA, 31 bp, artificial sequence
  misc_feature: DNAzyme
gcaccgcgggctagctacaacgacccccccg

SEQ ID NO: 5529 - DNA, 31 bp, artificial sequence
  misc_feature: DNAzyme
tggcaccgggctagctacaacgagccccccc

SEQ ID NO: 5530 - DNA, 31 bp, artificial sequence
  misc_feature: DNAzyme
tgatggcaggctagctacaacgacgcgcccc

SEQ ID NO: 5531 - DNA, 31 bp, artificial sequence
  misc_feature: DNAzyme
aatgatggggctagctacaacgaaccgcgcc

SEQ ID NO: 5532 - DNA, 31 bp, artificial sequence
  misc_feature: DNAzyme
gagaatgaggctagctacaacgaggcaccgc

SEQ ID NO: 5533 - DNA, 31 bp, artificial sequence
  misc_feature: DNAzyme
gaggagaaggctagctacaacgagatggcac

SEQ ID NO: 5534 - DNA, 31 bp, artificial sequence
  misc_feature: DNAzyme
cacacacgggctagctacaacgagaggagaa

SEQ ID NO: 5535 - DNA, 31 bp, artificial sequence
  misc_feature: DNAzyme
accacacaggctagctacaacgagtgaggag

SEQ ID NO: 5536 - DNA, 31 bp, artificial sequence
  misc_feature: DNAzyme
ggaccacaggctagctacaacgaacgtgagg

SEQ ID NO: 5537 - DNA, 31 bp, artificial sequence
  misc_feature: DNAzyme
gtggaccaggctagctacaacgaacacgtga

SEQ ID NO: 5538 - DNA, 31 bp, artificial sequence
  misc_feature: DNAzyme
tgggtggaggctagctacaacgacacacacg

SEQ ID NO: 5539 - DNA, 31 bp, artificial sequence
  misc_feature: DNAzyme
gctctgggggctagctacaacgaggaccaca

SEQ ID NO: 5540 - DNA, 31 bp, artificial sequence
  misc_feature: DNAzyme
aagattagggctagctacaacgatctgggtg

SEQ ID NO: 5541 - DNA, 31 bp, artificial sequence
  misc_feature: DNAzyme
gtcaaagaggctagctacaacgatagctctg

SEQ ID NO: 5542 - DNA, 31 bp, artificial sequence
  misc_feature: DNAzyme
tggtgatgggctagctacaacgacaaagatt

SEQ ID NO: 5543 - DNA, 31 bp, artificial sequence
  misc_feature: DNAzyme
tttggtgaggctagctacaacgagtcaaaga

SEQ ID NO: 5544 - DNA, 31 bp, artificial sequence
  misc_feature: DNAzyme
aattttggggctagctacaacgagatgtcaa

SEQ ID NO: 5545 - DNA, 31 bp, artificial sequence
  misc_feature: DNAzyme
gagcataaggctagctacaacgatttggtga

SEQ ID NO: 5546 - DNA, 31 bp, artificial sequence
  misc_feature: DNAzyme
ggcgagcaggctagctacaacgaaattttgg

SEQ ID NO: 5547 - DNA, 31 bp, artificial sequence
  misc_feature: DNAzyme
atggcgagggctagctacaacgaataatttt

SEQ ID NO: 5548 - DNA, 31 bp, artificial sequence
  misc_feature: DNAzyme
gagtatggggctagctacaacgagagcataa

SEQ ID NO: 5549 - DNA, 31 bp, artificial sequence
  misc_feature: DNAzyme
gccgagtaggctagctacaacgaggcgagca

SEQ ID NO: 5550 - DNA, 31 bp, artificial sequence
  misc_feature: DNAzyme
gggccgagggctagctacaacgaatggcgag

SEQ ID NO: 5551 - DNA, 31 bp, artificial sequence
  misc_feature: DNAzyme
tgagcgggggctagctacaacgacgagtatg

SEQ ID NO: 5552 - DNA, 31 bp, artificial sequence
  misc_feature: DNAzyme
accatgagggctagctacaacgagggccgag

SEQ ID NO: 5553 - DNA, 31 bp, artificial sequence
  misc_feature: DNAzyme
gagcaccaggctagctacaacgagagcgggc

SEQ ID NO: 5554 - DNA, 31 bp, artificial sequence
  misc_feature: DNAzyme
ctggagcaggctagctacaacgacatgagcg

SEQ ID NO: 5555 - DNA, 31 bp, artificial sequence
  misc_feature: DNAzyme
gcctggagggctagctacaacgaaccatgag

SEQ ID NO: 5556 - DNA, 31 bp, artificial sequence
  misc_feature: DNAzyme
tataccagggctagctacaacgactggagca

SEQ ID NO: 5557 - DNA, 31 bp, artificial sequence
  misc_feature: DNAzyme
ttgctataggctagctacaacgacagcctgg

SEQ ID NO: 5558 - DNA, 31 bp, artificial sequence
  misc_feature: DNAzyme
ttttgctaggctagctacaacgaaccagcct

SEQ ID NO: 5559 - DNA, 31 bp, artificial sequence
  misc_feature: DNAzyme
cacttttgggctagctacaacgatataccag

SEQ ID NO: 5560 - DNA, 31 bp, artificial sequence
  misc_feature: DNAzyme
gtccggcaggctagctacaacgattttgcta

SEQ ID NO: 5561 - DNA, 31 bp, artificial sequence
  misc_feature: DNAzyme
aagtccggggctagctacaacgaacttttgc

SEQ ID NO: 5562 - DNA, 31 bp, artificial sequence
  misc_feature: DNAzyme
gcacaaagggctagctacaacgaccggcact

SEQ ID NO: 5563 - DNA, 31 bp, artificial sequence
  misc_feature: DNAzyme
agcccgcaggctagctacaacgaaaagtccg

SEQ ID NO: 5564 - DNA, 31 bp, artificial sequence
  misc_feature: DNAzyme
tgagcccgggctagctacaacgaacaaagtc

SEQ ID NO: 5565 - DNA, 31 bp, artificial sequence
  misc_feature: DNAzyme
cccttgagggctagctacaacgaccgcacaa

SEQ ID NO: 5566 - DNA, 31 bp, artificial sequence
  misc_feature: DNAzyme
acggatgaggctagctacaacgacccttgag

SEQ ID NO: 5567 - DNA, 31 bp, artificial sequence
  misc_feature: DNAzyme
ttcacggaggctagctacaacgagacccctt

SEQ ID NO: 5568 - DNA, 31 bp, artificial sequence
  misc_feature: DNAzyme
tgcattcaggctagctacaacgaggatgacc

SEQ ID NO: 5569 - DNA, 31 bp, artificial sequence
  misc_feature: DNAzyme
aaaatgcaggctagctacaacgatcacggat

SEQ ID NO: 5570 - DNA, 31 bp, artificial sequence
  misc_feature: DNAzyme
ccaaaatgggctagctacaacgaattcacgg

SEQ ID NO: 5571 - DNA, 31 bp, artificial sequence
  misc_feature: DNAzyme
caccaaaaggctagctacaacgagcattcac

SEQ ID NO: 5572 - DNA, 31 bp, artificial sequence
  misc_feature: DNAzyme
tttccgcaggctagctacaacgacaaaatgc

SEQ ID NO: 5573 - DNA, 31 bp, artificial sequence
  misc_feature: DNAzyme
actttccgggctagctacaacgaaccaaaat

SEQ ID NO: 5574 - DNA, 31 bp, artificial sequence
  misc_feature: DNAzyme
cccaccgaggctagctacaacgatttccgca

SEQ ID NO: 5575 - DNA, 31 bp, artificial sequence
  misc_feature: DNAzyme
gccccccaggctagctacaacgacgactttc

SEQ ID NO: 5576 - DNA, 31 bp, artificial sequence
  misc_feature: DNAzyme
acatattgggctagctacaacgacccccacc

SEQ ID NO: 5577 - DNA, 31 bp, artificial sequence
  misc_feature: DNAzyme
tggacataggctagctacaacgatgcccccc

SEQ ID NO: 5578 - DNA, 31 bp, artificial sequence
  misc_feature: DNAzyme
tttggacaggctagctacaacgaattgcccc

SEQ ID NO: 5579 - DNA, 31 bp, artificial sequence
  misc_feature: DNAzyme
catttggaggctagctacaacgaatattgcc

SEQ ID NO: 5580 - DNA, 31 bp, artificial sequence
  misc_feature: DNAzyme
gaaggccaggctagctacaacgattggacat

SEQ ID NO: 5581 - DNA, 31 bp, artificial sequence
  misc_feature: DNAzyme
catgaaggggctagctacaacgacatttgga

SEQ ID NO: 5582 - DNA, 31 bp, artificial sequence
  misc_feature: DNAzyme
caacttcaggctagctacaacgagaaggcca

SEQ ID NO: 5583 - DNA, 31 bp, artificial sequence
  misc_feature: DNAzyme
tcggccaaggctagctacaacgattcatgaa

SEQ ID NO: 5584 - DNA, 31 bp, artificial sequence
  misc_feature: DNAzyme
caattcggggctagctacaacgacaacttca

SEQ ID NO: 5585 - DNA, 31 bp, artificial sequence
  misc_feature: DNAzyme
cctttcaaggctagctacaacgatcggccaa

SEQ ID NO: 5586 - DNA, 31 bp, artificial sequence
  misc_feature: DNAzyme
cggacgtaggctagctacaacgactttcaat

SEQ ID NO: 5587 - DNA, 31 bp, artificial sequence
  misc_feature: DNAzyme
gacggacgggctagctacaacgaacctttca

SEQ ID NO: 5588 - DNA, 31 bp, artificial sequence
  misc_feature: DNAzyme
tagacggaggctagctacaacgagtaccttt

SEQ ID NO: 5589 - DNA, 31 bp, artificial sequence
  misc_feature: DNAzyme
gtcatagaggctagctacaacgaggacgtac

SEQ ID NO: 5590 - DNA, 31 bp, artificial sequence
  misc_feature: DNAzyme
ggtggtcaggctagctacaacgaagacggac

SEQ ID NO: 5591 - DNA, 31 bp, artificial sequence
  misc_feature: DNAzyme
tgaggtggggctagctacaacgacatagacg

SEQ ID NO: 5592 - DNA, 31 bp, artificial sequence
  misc_feature: DNAzyme
gagtgaggggctagctacaacgaggtcatag

SEQ ID NO: 5593 - DNA, 31 bp, artificial sequence
  misc_feature: DNAzyme
cagtggagggctagctacaacgagaggtggt

SEQ ID NO: 5594 - DNA, 31 bp, artificial sequence
  misc_feature: DNAzyme
tcctgcagggctagctacaacgaggagtgag

SEQ ID NO: 5595 - DNA, 31 bp, artificial sequence
  misc_feature: DNAzyme
cagtcctgggctagctacaacgaagtggagt

SEQ ID NO: 5596 - DNA, 31 bp, artificial sequence
  misc_feature: DNAzyme
gggcccagggctagctacaacgacctgcagt

SEQ ID NO: 5597 - DNA, 31 bp, artificial sequence
  misc_feature: DNAzyme
tgtgtgggggctagctacaacgaccagtcct

SEQ ID NO: 5598 - DNA, 31 bp, artificial sequence
  misc_feature: DNAzyme
gacctgtgggctagctacaacgagggcccag

SEQ ID NO: 5599 - DNA, 31 bp, artificial sequence
  misc_feature: DNAzyme
tagacctgggctagctacaacgagtgggccc

SEQ ID NO: 5600 - DNA, 31 bp, artificial sequence
  misc_feature: DNAzyme
ctcgtagaggctagctacaacgactgtgtgg

SEQ ID NO: 5601 - DNA, 31 bp, artificial sequence
  misc_feature: DNAzyme
aggtctcgggctagctacaacgaagacctgt

SEQ ID NO: 5602 - DNA, 31 bp, artificial sequence
  misc_feature: DNAzyme
ccgccaggggctagctacaacgactcgtaga

SEQ ID NO: 5603 - DNA, 31 bp, artificial sequence
  misc_feature: DNAzyme
cgctaccgggctagctacaacgacaggtctc

SEQ ID NO: 5604 - DNA, 31 bp, artificial sequence
  misc_feature: DNAzyme
gaccgctaggctagctacaacgacgccaggt

SEQ ID NO: 5605 - DNA, 31 bp, artificial sequence
  misc_feature: DNAzyme
ctcgaccgggctagctacaacgataccgcca

SEQ ID NO: 5606 - DNA, 31 bp, artificial sequence
  misc_feature: DNAzyme
gggctcgaggctagctacaacgacgctaccg

SEQ ID NO: 5607 - DNA, 31 bp, artificial sequence
  misc_feature: DNAzyme
acgacgggggctagctacaacgatcgaccgc

SEQ ID NO: 5608 - DNA, 31 bp, artificial sequence
  misc_feature: DNAzyme
gaagacgaggctagctacaacgagggctcga

SEQ ID NO: 5609 - DNA, 31 bp, artificial sequence
  misc_feature: DNAzyme
ggagaagaggctagctacaacgagacgggct

SEQ ID NO: 5610 - DNA, 31 bp, artificial sequence
  misc_feature: DNAzyme
tttccatgggctagctacaacgacggagaag

SEQ ID NO: 5611 - DNA, 31 bp, artificial sequence
  misc_feature: DNAzyme
gatttccaggctagctacaacgagtcggaga

SEQ ID NO: 5612 - DNA, 31 bp, artificial sequence
  misc_feature: DNAzyme
gatcttgaggctagctacaacgattccatgt

SEQ ID NO: 5613 - DNA, 31 bp, artificial sequence
  misc_feature: DNAzyme
ggtgatgaggctagctacaacgacttgattt

SEQ ID NO: 5614 - DNA, 31 bp, artificial sequence
  misc_feature: DNAzyme
ccaggtgaggctagctacaacgagatcttga

SEQ ID NO: 5615 - DNA, 31 bp, artificial sequence
  misc_feature: DNAzyme
cccccaggggctagctacaacgagatgatct

SEQ ID NO: 5616 - DNA, 31 bp, artificial sequence
  misc_feature: DNAzyme
ccgcggtgggctagctacaacgactcccccc

SEQ ID NO: 5617 - DNA, 31 bp, artificial sequence
  misc_feature: DNAzyme
cgccgcggggctagctacaacgagtctcccc

SEQ ID NO: 5618 - DNA, 31 bp, artificial sequence
  misc_feature: DNAzyme
acacgccgggctagctacaacgaggtgtctc

SEQ ID NO: 5619 - DNA, 31 bp, artificial sequence
  misc_feature: DNAzyme
cccacacgggctagctacaacgacgcggtgt

SEQ ID NO: 5620 - DNA, 31 bp, artificial sequence
  misc_feature: DNAzyme
tccccacaggctagctacaacgagccgcggt

SEQ ID NO: 5621 - DNA, 31 bp, artificial sequence
  misc_feature: DNAzyme
tgtccccaggctagctacaacgaacgccgcg

SEQ ID NO: 5622 - DNA, 31 bp, artificial sequence
  misc_feature: DNAzyme
taatgatgggctagctacaacgaccccacac

SEQ ID NO: 5623 - DNA, 31 bp, artificial sequence
  misc_feature: DNAzyme
cataatgaggctagctacaacgagtccccac

SEQ ID NO: 5624 - DNA, 31 bp, artificial sequence
  misc_feature: DNAzyme
acccataaggctagctacaacgagatgtccc

SEQ ID NO: 5625 - DNA, 31 bp, artificial sequence
  misc_feature: DNAzyme
tagacccaggctagctacaacgaaatgatgt

SEQ ID NO: 5626 - DNA, 31 bp, artificial sequence
  misc_feature: DNAzyme
caggtagaggctagctacaacgaccataatg

SEQ ID NO: 5627 - DNA, 31 bp, artificial sequence
  misc_feature: DNAzyme
gagacaggggctagctacaacgaagacccat

SEQ ID NO: 5628 - DNA, 31 bp, artificial sequence
  misc_feature: DNAzyme
ggcggagaggctagctacaacgaaggtagac

SEQ ID NO: 5629 - DNA, 31 bp, artificial sequence
  misc_feature: DNAzyme
ccttcgggggctagctacaacgaggagacag

SEQ ID NO: 5630 - DNA, 31 bp, artificial sequence
  misc_feature: DNAzyme
taggagtaggctagctacaacgactccctcc

SEQ ID NO: 5631 - DNA, 31 bp, artificial sequence
  misc_feature: DNAzyme
cctaggagggctagctacaacgaatctccct

SEQ ID NO: 5632 - DNA, 31 bp, artificial sequence
  misc_feature: DNAzyme
tcggctggggctagctacaacgacctaggag

SEQ ID NO: 5633 - DNA, 31 bp, artificial sequence
  misc_feature: DNAzyme
actgtcggggctagctacaacgatggtccta

SEQ ID NO: 5634 - DNA, 31 bp, artificial sequence
  misc_feature: DNAzyme
caagactgggctagctacaacgacggctggt

SEQ ID NO: 5635 - DNA, 31 bp, artificial sequence
  misc_feature: DNAzyme
cctcaagaggctagctacaacgatgtcggct

SEQ ID NO: 5636 - DNA, 31 bp, artificial sequence
  misc_feature: DNAzyme
cacccctgggctagctacaacgaccctcaag

SEQ ID NO: 5637 - DNA, 31 bp, artificial sequence
  misc_feature: DNAzyme
agtcgccaggctagctacaacgaccctgccc

SEQ ID NO: 5638 - DNA, 31 bp, artificial sequence
  misc_feature: DNAzyme
aggagtcgggctagctacaacgacacccctg

SEQ ID NO: 5639 - DNA, 31 bp, artificial sequence
  misc_feature: DNAzyme
gcgaggagggctagctacaacgacgccaccc

SEQ ID NO: 5640 - DNA, 31 bp, artificial sequence
  misc_feature: DNAzyme
aatgggcgggctagctacaacgagaggagtc

SEQ ID NO: 5641 - DNA, 31 bp, artificial sequence
  misc_feature: DNAzyme
gtaatgggggctagctacaacgagcgaggag

SEQ ID NO: 5642 - DNA, 31 bp, artificial sequence
  misc_feature: DNAzyme
ggccgtaaggctagctacaacgagggcgcga

SEQ ID NO: 5643 - DNA, 31 bp, artificial sequence
  misc_feature: DNAzyme
gtaggccgggctagctacaacgaaatgggcg

SEQ ID NO: 5644 - DNA, 31 bp, artificial sequence
  misc_feature: DNAzyme
ggagtaggggctagctacaacgacgtaatgg

SEQ ID NO: 5645 - DNA, 31 bp, artificial sequence
  misc_feature: DNAzyme
gttgggagggctagctacaacgaaggccgta

SEQ ID NO: 5646 - DNA, 31 bp, artificial sequence
  misc_feature: DNAzyme
cgcgtctgggctagctacaacgatgggagta

SEQ ID NO: 5647 - DNA, 31 bp, artificial sequence
  misc_feature: DNAzyme
gccccgcgggctagctacaacgactgttggg

SEQ ID NO: 5648 - DNA, 31 bp, artificial sequence
  misc_feature: DNAzyme
aggccccgggctagctacaacgagtctgttg

SEQ ID NO: 5649 - DNA, 31 bp, artificial sequence
  misc_feature: DNAzyme
caaacaggggctagctacaacgacccgcgtc

SEQ ID NO: 5650 - DNA, 31 bp, artificial sequence
  misc_feature: DNAzyme
cagccaaaggctagctacaacgaaggccccg

SEQ ID NO: 5651 - DNA, 31 bp, artificial sequence
  misc_feature: DNAzyme
taatgcagggctagctacaacgacaaacagg

SEQ ID NO: 5652 - DNA, 31 bp, artificial sequence
  misc_feature: DNAzyme
tgataatgggctagctacaacgaagccaaac

SEQ ID NO: 5653 - DNA, 31 bp, artificial sequence
  misc_feature: DNAzyme
ggtgataaggctagctacaacgagcagccaa

SEQ ID NO: 5654 - DNA, 31 bp, artificial sequence
  misc_feature: DNAzyme
gctggtgaggctagctacaacgaaatgcagc

SEQ ID NO: 5655 - DNA, 31 bp, artificial sequence
  misc_feature: DNAzyme
gaggctggggctagctacaacgagataatgc

SEQ ID NO: 5656 - DNA, 31 bp, artificial sequence
  misc_feature: DNAzyme
ccgtgaggggctagctacaacgatggtgata

SEQ ID NO: 5657 - DNA, 31 bp, artificial sequence
  misc_feature: DNAzyme
ccggcccgggctagctacaacgagaggctgg

SEQ ID NO: 5658 - DNA, 31 bp, artificial sequence
  misc_feature: DNAzyme
tgtcccggggctagctacaacgaccgtgagg

SEQ ID NO: 5659 - DNA, 31 bp, artificial sequence
  misc_feature: DNAzyme
ggttcttgggctagctacaacgacccggccc

SEQ ID NO: 5660 - DNA, 31 bp, artificial sequence
  misc_feature: DNAzyme
cgacttggggctagctacaacgatcttgtcc

SEQ ID NO: 5661 - DNA, 31 bp, artificial sequence
  misc_feature: DNAzyme
cccctcgaggctagctacaacgattggttct

SEQ ID NO: 5662 - DNA, 31 bp, artificial sequence
  misc_feature: DNAzyme
cacttgaaggctagctacaacgattccccct

SEQ ID NO: 5663 - DNA, 31 bp, artificial sequence
  misc_feature: DNAzyme
ggaaaccaggctagctacaacgattgaactt

SEQ ID NO: 5664 - DNA, 31 bp, artificial sequence
  misc_feature: DNAzyme
ggtggaaaggctagctacaacgacacttgaa

SEQ ID NO: 5665 - DNA, 31 bp, artificial sequence
  misc_feature: DNAzyme
cgtcgcggggctagctacaacgaggaaacca

SEQ ID NO: 5666 - DNA, 31 bp, artificial sequence
  misc_feature: DNAzyme
ctgcgtcgggctagctacaacgaggtggaaa

SEQ ID NO: 5667 - DNA, 31 bp, artificial sequence
  misc_feature: DNAzyme
agactgcgggctagctacaacgacgcggtgg

SEQ ID NO: 5668 - DNA, 31 bp, artificial sequence
  misc_feature: DNAzyme
aaagactgggctagctacaacgagtcgcggt

SEQ ID NO: 5669 - DNA, 31 bp, artificial sequence
  misc_feature: DNAzyme
aggaaagaggctagctacaacgatgcgtcgc

SEQ ID NO: 5670 - DNA, 31 bp, artificial sequence
  misc_feature: DNAzyme
gcaggtcgggctagctacaacgataggaaag

SEQ ID NO: 5671 - DNA, 31 bp, artificial sequence
  misc_feature: DNAzyme
gacgcaggggctagctacaacgacgctagga

SEQ ID NO: 5672 - DNA, 31 bp, artificial sequence
  misc_feature: DNAzyme
cgttgacgggctagctacaacgaaggtcgct

SEQ ID NO: 5673 - DNA, 31 bp, artificial sequence
  misc_feature: DNAzyme
gccgttgaggctagctacaacgagcaggtcg

SEQ ID NO: 5674 - DNA, 31 bp, artificial sequence
  misc_feature: DNAzyme
acacgccgggctagctacaacgatgacgcag

SEQ ID NO: 5675 - DNA, 31 bp, artificial sequence
  misc_feature: DNAzyme
agcacacgggctagctacaacgacgttgacg

SEQ ID NO: 5676 - DNA, 31 bp, artificial sequence
  misc_feature: DNAzyme
ccagcacaggctagctacaacgagccgttga

SEQ ID NO: 5677 - DNA, 31 bp, artificial sequence
  misc_feature: DNAzyme
gtccagcaggctagctacaacgaacgccgtt

SEQ ID NO: 5678 - DNA, 31 bp, artificial sequence
  misc_feature: DNAzyme
cagtccagggctagctacaacgaacacgccg

SEQ ID NO: 5679 - DNA, 31 bp, artificial sequence
  misc_feature: DNAzyme
gtagacagggctagctacaacgaccagcaca

SEQ ID NO: 5680 - DNA, 31 bp, artificial sequence
  misc_feature: DNAzyme
gtggtagaggctagctacaacgaagtccagc

SEQ ID NO: 5681 - DNA, 31 bp, artificial sequence
  misc_feature: DNAzyme
cgccgtggggctagctacaacgaagacagtc

SEQ ID NO: 5682 - DNA, 31 bp, artificial sequence
  misc_feature: DNAzyme
cggcgccgggctagctacaacgaggtagaca

SEQ ID NO: 5683 - DNA, 31 bp, artificial sequence
  misc_feature: DNAzyme
agccggcgggctagctacaacgacgtggtag

SEQ ID NO: 5684 - DNA, 31 bp, artificial sequence
  misc_feature: DNAzyme
tgagccggggctagctacaacgagccgtggt

SEQ ID NO: 5685 - DNA, 31 bp, artificial sequence
  misc_feature: DNAzyme
tctttgagggctagctacaacgacggcgccg

SEQ ID NO: 5686 - DNA, 31 bp, artificial sequence
  misc_feature: DNAzyme
ggctagggggctagctacaacgactttgagc

SEQ ID NO: 5687 - DNA, 31 bp, artificial sequence
  misc_feature: DNAzyme
tgggccggggctagctacaacgatagggtct

SEQ ID NO: 5688 - DNA, 31 bp, artificial sequence
  misc_feature: DNAzyme
cctttgggggctagctacaacgacggctagg

SEQ ID NO: 5689 - DNA, 31 bp, artificial sequence
  misc_feature: DNAzyme
tgattggaggctagctacaacgacctttggg

SEQ ID NO: 5690 - DNA, 31 bp, artificial sequence
  misc_feature: DNAzyme
ttgggtgaggctagctacaacgatggaccct

SEQ ID NO: 5691 - DNA, 31 bp, artificial sequence
  misc_feature: DNAzyme
catttgggggctagctacaacgagattggac

SEQ ID NO: 5692 - DNA, 31 bp, artificial sequence
  misc_feature: DNAzyme
ggtgtacaggctagctacaacgattgggtga

SEQ ID NO: 5693 - DNA, 31 bp, artificial sequence
  misc_feature: DNAzyme
ttggtgtaggctagctacaacgaatttgggt

SEQ ID NO: 5694 - DNA, 31 bp, artificial sequence
  misc_feature: DNAzyme
cattggtgggctagctacaacgaacatttgg

SEQ ID NO: 5695 - DNA, 31 bp, artificial sequence
  misc_feature: DNAzyme
tacattggggctagctacaacgagtacattt

SEQ ID NO: 5696 - DNA, 31 bp, artificial sequence
  misc_feature: DNAzyme
ggtctacaggctagctacaacgatggtgtac

SEQ ID NO: 5697 - DNA, 31 bp, artificial sequence
  misc_feature: DNAzyme
ctggtctaggctagctacaacgaattggtgt

SEQ ID NO: 5698 - DNA, 31 bp, artificial sequence
  misc_feature: DNAzyme
ggtcctggggctagctacaacgactacattg

SEQ ID NO: 5699 - DNA, 31 bp, artificial sequence
  misc_feature: DNAzyme
cgacgaggggctagctacaacgacctggtct

SEQ ID NO: 5700 - DNA, 31 bp, artificial sequence
  misc_feature: DNAzyme
ccatccgaggctagctacaacgagaggtcct

SEQ ID NO: 5701 - DNA, 31 bp, artificial sequence
  misc_feature: DNAzyme
gccggccaggctagctacaacgaccgacgag

SEQ ID NO: 5702 - DNA, 31 bp, artificial sequence
  misc_feature: DNAzyme
ggcgccggggctagctacaacgacatccgac

SEQ ID NO: 5703 - DNA, 31 bp, artificial sequence
  misc_feature: DNAzyme
ggggggcgggctagctacaacgacggccatc

SEQ ID NO: 5704 - DNA, 31 bp, artificial sequence
  misc_feature: DNAzyme
ccggggggggctagctacaacgagccggcca

SEQ ID NO: 5705 - DNA, 31 bp, artificial sequence
  misc_feature: DNAzyme
ggaccgcgggctagctacaacgatccggggg

SEQ ID NO: 5706 - DNA, 31 bp, artificial sequence
  misc_feature: DNAzyme
aaggaccgggctagctacaacgagctccggg

SEQ ID NO: 5707 - DNA, 31 bp, artificial sequence
  misc_feature: DNAzyme
gtcaaggaggctagctacaacgacgcgctcc

SEQ ID NO: 5708 - DNA, 31 bp, artificial sequence
  misc_feature: DNAzyme
gcatggtgggctagctacaacgacaaggacc

SEQ ID NO: 5709 - DNA, 31 bp, artificial sequence
  misc_feature: DNAzyme
gtgcatggggctagctacaacgagtcaagga

SEQ ID NO: 5710 - DNA, 31 bp, artificial sequence
  misc_feature: DNAzyme
caggtgcaggctagctacaacgaggtgtcaa

SEQ ID NO: 5711 - DNA, 31 bp, artificial sequence
  misc_feature: DNAzyme
cgcaggtgggctagctacaacgaatggtgtc

SEQ ID NO: 5712 - DNA, 31 bp, artificial sequence
  misc_feature: DNAzyme
gccgcaggggctagctacaacgagcatggtg

SEQ ID NO: 5713 - DNA, 31 bp, artificial sequence
  misc_feature: DNAzyme
agccgccgggctagctacaacgaaggtgcat

SEQ ID NO: 5714 - DNA, 31 bp, artificial sequence
  misc_feature: DNAzyme
ccgagccgggctagctacaacgacgcaggtg

SEQ ID NO: 5715 - DNA, 31 bp, artificial sequence
  misc_feature: DNAzyme
ggtccgagggctagctacaacgacgccgcag

SEQ ID NO: 5716 - DNA, 31 bp, artificial sequence
  misc_feature: DNAzyme
agtaaaggggctagctacaacgaccgagccg

SEQ ID NO: 5717 - DNA, 31 bp, artificial sequence
  misc_feature: DNAzyme
tgaccaagggctagctacaacgaaaaggtcc

SEQ ID NO: 5718 - DNA, 31 bp, artificial sequence
  misc_feature: DNAzyme
tctcgtgaggctagctacaacgacaagtaaa

SEQ ID NO: 5719 - DNA, 31 bp, artificial sequence
  misc_feature: DNAzyme
gtgtctcgggctagctacaacgagaccaagt

SEQ ID NO: 5720 - DNA, 31 bp, artificial sequence
  misc_feature: DNAzyme
tcagcgtgggctagctacaacgactcgtgac

SEQ ID NO: 5721 - DNA, 31 bp, artificial sequence
  misc_feature: DNAzyme
catcagcgggctagctacaacgagtctcgtg

SEQ ID NO: 5722 - DNA, 31 bp, artificial sequence
  misc_feature: DNAzyme
gacatcagggctagctacaacgagtgtctcg

SEQ ID NO: 5723 - DNA, 31 bp, artificial sequence
  misc_feature: DNAzyme
gaatgacaggctagctacaacgacagcgtgt

SEQ ID NO: 5724 - DNA, 31 bp, artificial sequence
  misc_feature: DNAzyme
cggaatgaggctagctacaacgaatcagcgt

SEQ ID NO: 5725 - DNA, 31 bp, artificial sequence
  misc_feature: DNAzyme
caccggaaggctagctacaacgagacatcag

SEQ ID NO: 5726 - DNA, 31 bp, artificial sequence
  misc_feature: DNAzyme
ccggcgcaggctagctacaacgacggaatga

SEQ ID NO: 5727 - DNA, 31 bp, artificial sequence
  misc_feature: DNAzyme
cgccggcgggctagctacaacgaaccggaat

SEQ ID NO: 5728 - DNA, 31 bp, artificial sequence
  misc_feature: DNAzyme
cccgccggggctagctacaacgagcaccgga

SEQ ID NO: 5729 - DNA, 31 bp, artificial sequence
  misc_feature: DNAzyme
tcaccccgggctagctacaacgacggcgcac

SEQ ID NO: 5730 - DNA, 31 bp, artificial sequence
  misc_feature: DNAzyme
tgctgtcaggctagctacaacgacccgccgg

SEQ ID NO: 5731 - DNA, 31 bp, artificial sequence
  misc_feature: DNAzyme
ccctgctgggctagctacaacgacaccccgc

SEQ ID NO: 5732 - DNA, 31 bp, artificial sequence
  misc_feature: DNAzyme
tccccctgggctagctacaacgatgtcaccc

SEQ ID NO: 5733 - DNA, 31 bp, artificial sequence
  misc_feature: DNAzyme
atagtaagggctagctacaacgatccccctg

SEQ ID NO: 5734 - DNA, 31 bp, artificial sequence
  misc_feature: DNAzyme
ggggatagggctagctacaacgaaagctccc

SEQ ID NO: 5735 - DNA, 31 bp, artificial sequence
  misc_feature: DNAzyme
ctgggggaggctagctacaacgaagtaagct

SEQ ID NO: 5736 - DNA, 31 bp, artificial sequence
  misc_feature: DNAzyme
gagatgggggctagctacaacgactggggga

SEQ ID NO: 5737 - DNA, 31 bp, artificial sequence
  misc_feature: DNAzyme
gtaggagaggctagctacaacgagggcctgg

SEQ ID NO: 5738 - DNA, 31 bp, artificial sequence
  misc_feature: DNAzyme
ccttcaagggctagctacaacgaaggagatg

SEQ ID NO: 5739 - DNA, 31 bp, artificial sequence
  misc_feature: DNAzyme
ccgaggagggctagctacaacgaccttcaag

SEQ ID NO: 5740 - DNA, 31 bp, artificial sequence
  misc_feature: DNAzyme
gtggaccgggctagctacaacgaccgaggag

SEQ ID NO: 5741 - DNA, 31 bp, artificial sequence
  misc_feature: DNAzyme
gcagtggaggctagctacaacgacgcccgag

SEQ ID NO: 5742 - DNA, 31 bp, artificial sequence
  misc_feature: DNAzyme
cagagcagggctagctacaacgaggaccgcc

SEQ ID NO: 5743 - DNA, 31 bp, artificial sequence
  misc_feature: DNAzyme
gggcagagggctagctacaacgaagtggacc

SEQ ID NO: 5744 - DNA, 31 bp, artificial sequence
  misc_feature: DNAzyme
ccgaagggggctagctacaacgaagagcagt

SEQ ID NO: 5745 - DNA, 31 bp, artificial sequence
  misc_feature: DNAzyme
acaacgtgggctagctacaacgacccgaagg

SEQ ID NO: 5746 - DNA, 31 bp, artificial sequence
  misc_feature: DNAzyme
ccacaacgggctagctacaacgagccccgaa

SEQ ID NO: 5747 - DNA, 31 bp, artificial sequence
  misc_feature: DNAzyme
gcccacaaggctagctacaacgagtgccccg

SEQ ID NO: 5748 - DNA, 31 bp, artificial sequence
  misc_feature: DNAzyme
gatgcccaggctagctacaacgaaacgtgcc

SEQ ID NO: 5749 - DNA, 31 bp, artificial sequence
  misc_feature: DNAzyme
ggaagatgggctagctacaacgaccacaacg

SEQ ID NO: 5750 - DNA, 31 bp, artificial sequence
  misc_feature: DNAzyme
ccggaagaggctagctacaacgagcccacaa

SEQ ID NO: 5751 - DNA, 31 bp, artificial sequence
  misc_feature: DNAzyme
cacagcagggctagctacaacgaccggaaga

SEQ ID NO: 5752 - DNA, 31 bp, artificial sequence
  misc_feature: DNAzyme
gcacacagggctagctacaacgaagcccgga

SEQ ID NO: 5753 - DNA, 31 bp, artificial sequence
  misc_feature: DNAzyme
ggtgcacaggctagctacaacgaagcagccc

SEQ ID NO: 5754 - DNA, 31 bp, artificial sequence
  misc_feature: DNAzyme
cgggtgcaggctagctacaacgaacagcagc

SEQ ID NO: 5755 - DNA, 31 bp, artificial sequence
  misc_feature: DNAzyme
cccgggtgggctagctacaacgaacacagca

SEQ ID NO: 5756 - DNA, 31 bp, artificial sequence
  misc_feature: DNAzyme
cccccgggggctagctacaacgagcacacag

SEQ ID NO: 5757 - DNA, 31 bp, artificial sequence
  misc_feature: DNAzyme
cttcgcaaggctagctacaacgacccccggg

SEQ ID NO: 5758 - DNA, 31 bp, artificial sequence
  misc_feature: DNAzyme
cgccttcgggctagctacaacgaaacccccc

SEQ ID NO: 5759 - DNA, 31 bp, artificial sequence
  misc_feature: DNAzyme
gtccaccgggctagctacaacgacttcgcaa

SEQ ID NO: 5760 - DNA, 31 bp, artificial sequence
  misc_feature: DNAzyme
aaagtccaggctagctacaacgacgccttcg

SEQ ID NO: 5761 - DNA, 31 bp, artificial sequence
  misc_feature: DNAzyme
gtacaaagggctagctacaacgaccaccgcc

SEQ ID NO: 5762 - DNA, 31 bp, artificial sequence
  misc_feature: DNAzyme
aacgggtaggctagctacaacgaaaagtcca

SEQ ID NO: 5763 - DNA, 31 bp, artificial sequence
  misc_feature: DNAzyme
tcaacgggggctagctacaacgaacaaagtc

SEQ ID NO: 5764 - DNA, 31 bp, artificial sequence
  misc_feature: DNAzyme
agactcaaggctagctacaacgagggtacaa

SEQ ID NO: 5765 - DNA, 31 bp, artificial sequence
  misc_feature: DNAzyme
tccatagaggctagctacaacgatcaacggg

SEQ ID NO: 5766 - DNA, 31 bp, artificial sequence
  misc_feature: DNAzyme
agtttccaggctagctacaacgaagactcaa

SEQ ID NO: 5767 - DNA, 31 bp, artificial sequence
  misc_feature: DNAzyme
catggtagggctagctacaacgattccatag

SEQ ID NO: 5768 - DNA, 31 bp, artificial sequence
  misc_feature: DNAzyme
ccgcatggggctagctacaacgaagtttcca

SEQ ID NO: 5769 - DNA, 31 bp, artificial sequence
  misc_feature: DNAzyme
ggaccgcaggctagctacaacgaggtagttt

SEQ ID NO: 5770 - DNA, 31 bp, artificial sequence
  misc_feature: DNAzyme
ggggaccgggctagctacaacgaatggtagt

SEQ ID NO: 5771 - DNA, 31 bp, artificial sequence
  misc_feature: DNAzyme
accggggaggctagctacaacgacgcatggt

SEQ ID NO: 5772 - DNA, 31 bp, artificial sequence
  misc_feature: DNAzyme
cgtgaagaggctagctacaacgacggggacc

SEQ ID NO: 5773 - DNA, 31 bp, artificial sequence
  misc_feature: DNAzyme
gttgtccgggctagctacaacgagaagaccg

SEQ ID NO: 5774 - DNA, 31 bp, artificial sequence
  misc_feature: DNAzyme
acgagttgggctagctacaacgaccgtgaag

SEQ ID NO: 5775 - DNA, 31 bp, artificial sequence
  misc_feature: DNAzyme
gggacgagggctagctacaacgatgtccgtg

SEQ ID NO: 5776 - DNA, 31 bp, artificial sequence
  misc_feature: DNAzyme
gggggggaggctagctacaacgagagttgtc

SEQ ID NO: 5777 - DNA, 31 bp, artificial sequence
  misc_feature: DNAzyme
cggtacggggctagctacaacgatggggggg

SEQ ID NO: 5778 - DNA, 31 bp, artificial sequence
  misc_feature: DNAzyme
ctgcggtaggctagctacaacgaggctgggg

SEQ ID NO: 5779 - DNA, 31 bp, artificial sequence
  misc_feature: DNAzyme
gtctgcggggctagctacaacgaacggctgg

SEQ ID NO: 5780 - DNA, 31 bp, artificial sequence
  misc_feature: DNAzyme
aatgtctgggctagctacaacgaggtacggc

SEQ ID NO: 5781 - DNA, 31 bp, artificial sequence
  misc_feature: DNAzyme
ttggaatgggctagctacaacgactgcggta

SEQ ID NO: 5782 - DNA, 31 bp, artificial sequence
  misc_feature: DNAzyme
acttggaaggctagctacaacgagtctgcgg

SEQ ID NO: 5783 - DNA, 31 bp, artificial sequence
  misc_feature: DNAzyme
gtgggccaggctagctacaacgattggaatg

SEQ ID NO: 5784 - DNA, 31 bp, artificial sequence
  misc_feature: DNAzyme
taggtgggggctagctacaacgacacttgga

SEQ ID NO: 5785 - DNA, 31 bp, artificial sequence
  misc_feature: DNAzyme
cgtgtaggggctagctacaacgagggccact

SEQ ID NO: 5786 - DNA, 31 bp, artificial sequence
  misc_feature: DNAzyme
ggagcgtgggctagctacaacgaaggtgggc

SEQ ID NO: 5787 - DNA, 31 bp, artificial sequence
  misc_feature: DNAzyme
tgggagcgggctagctacaacgagtaggtgg

SEQ ID NO: 5788 - DNA, 31 bp, artificial sequence
  misc_feature: DNAzyme
agtgggagggctagctacaacgagtgtaggt

SEQ ID NO: 5789 - DNA, 31 bp, artificial sequence
  misc_feature: DNAzyme
gctgccagggctagctacaacgagggagcgt

SEQ ID NO: 5790 - DNA, 31 bp, artificial sequence
  misc_feature: DNAzyme
tgccgctgggctagctacaacgacagtggga

SEQ ID NO: 5791 - DNA, 31 bp, artificial sequence
  misc_feature: DNAzyme
tcttgccgggctagctacaacgatgccagtg

SEQ ID NO: 5792 - DNA, 31 bp, artificial sequence
  misc_feature: DNAzyme
tgctcttgggctagctacaacgacgctgcca

SEQ ID NO: 5793 - DNA, 31 bp, artificial sequence
  misc_feature: DNAzyme
ccttagtgggctagctacaacgatcttgccg

SEQ ID NO: 5794 - DNA, 31 bp, artificial sequence
  misc_feature: DNAzyme
taccttagggctagctacaacgagctcttgc

SEQ ID NO: 5795 - DNA, 31 bp, artificial sequence
  misc_feature: DNAzyme
agccggtaggctagctacaacgacttagtgc

SEQ ID NO: 5796 - DNA, 31 bp, artificial sequence
  misc_feature: DNAzyme
gcagccggggctagctacaacgaaccttagt

SEQ ID NO: 5797 - DNA, 31 bp, artificial sequence
  misc_feature: DNAzyme
atatgcagggctagctacaacgacggtacct

SEQ ID NO: 5798 - DNA, 31 bp, artificial sequence
  misc_feature: DNAzyme
tgcatatgggctagctacaacgaagccggta

SEQ ID NO: 5799 - DNA, 31 bp, artificial sequence
  misc_feature: DNAzyme
gctgcataggctagctacaacgagcagccgg

SEQ ID NO: 5800 - DNA, 31 bp, artificial sequence
  misc_feature: DNAzyme
gggctgcaggctagctacaacgaatgcagcc

SEQ ID NO: 5801 - DNA, 31 bp, artificial sequence
  misc_feature: DNAzyme
ttgggctgggctagctacaacgaatatgcag

SEQ ID NO: 5802 - DNA, 31 bp, artificial sequence
  misc_feature: DNAzyme
cccttgggggctagctacaacgatgcatatg

SEQ ID NO: 5803 - DNA, 31 bp, artificial sequence
  misc_feature: DNAzyme
actttgtaggctagctacaacgaccttgggc

SEQ ID NO: 5804 - DNA, 31 bp, artificial sequence
  misc_feature: DNAzyme
gcactttgggctagctacaacgaacccttgg

SEQ ID NO: 5805 - DNA, 31 bp, artificial sequence
  misc_feature: DNAzyme
gacgagcaggctagctacaacgatttgtacc

SEQ ID NO: 5806 - DNA, 31 bp, artificial sequence
  misc_feature: DNAzyme
aggacgagggctagctacaacgaactttgta

SEQ ID NO: 5807 - DNA, 31 bp, artificial sequence
  misc_feature: DNAzyme
atttaggaggctagctacaacgagagcactt

SEQ ID NO: 5808 - DNA, 31 bp, artificial sequence
  misc_feature: DNAzyme
cggacggaggctagctacaacgattaggacg

SEQ ID NO: 5809 - DNA, 31 bp, artificial sequence
  misc_feature: DNAzyme
gtaacggaggctagctacaacgaggatttag

SEQ ID NO: 5810 - DNA, 31 bp, artificial sequence
  misc_feature: DNAzyme
ggcggtaaggctagctacaacgaggacggat

SEQ ID NO: 5811 - DNA, 31 bp, artificial sequence
  misc_feature: DNAzyme
ggtggcggggctagctacaacgaaacggacg

SEQ ID NO: 5812 - DNA, 31 bp, artificial sequence
  misc_feature: DNAzyme
taaggtggggctagctacaacgaggtaacgg

SEQ ID NO: 5813 - DNA, 31 bp, artificial sequence
  misc_feature: DNAzyme
ccctaaggggctagctacaacgaggcggtaa

SEQ ID NO: 5814 - DNA, 31 bp, artificial sequence
  misc_feature: DNAzyme
gccccaaaggctagctacaacgacctaaggt

SEQ ID NO: 5815 - DNA, 31 bp, artificial sequence
  misc_feature: DNAzyme
catatacgggctagctacaacgacccaaacc

SEQ ID NO: 5816 - DNA, 31 bp, artificial sequence
  misc_feature: DNAzyme
gacatataggctagctacaacgagccccaaa

SEQ ID NO: 5817 - DNA, 31 bp, artificial sequence
  misc_feature: DNAzyme
tagacataggctagctacaacgaacgcccca

SEQ ID NO: 5818 - DNA, 31 bp, artificial sequence
  misc_feature: DNAzyme
cttagacaggctagctacaacgaatacgccc

SEQ ID NO: 5819 - DNA, 31 bp, artificial sequence
  misc_feature: DNAzyme
gccttagaggctagctacaacgaatatacgc

SEQ ID NO: 5820 - DNA, 31 bp, artificial sequence
  misc_feature: DNAzyme
accgtgtgggctagctacaacgacttagaca

SEQ ID NO: 5821 - DNA, 31 bp, artificial sequence
  misc_feature: DNAzyme
acaccgtgggctagctacaacgagccttaga

SEQ ID NO: 5822 - DNA, 31 bp, artificial sequence
  misc_feature: DNAzyme
cgacaccgggctagctacaacgagtgcctta

SEQ ID NO: 5823 - DNA, 31 bp, artificial sequence
  misc_feature: DNAzyme
gatcgacaggctagctacaacgacgtgtgcc

SEQ ID NO: 5824 - DNA, 31 bp, artificial sequence
  misc_feature: DNAzyme
aggatcgaggctagctacaacgaaccgtgtg

SEQ ID NO: 5825 - DNA, 31 bp, artificial sequence
  misc_feature: DNAzyme
tgttaggaggctagctacaacgacgacaccg

SEQ ID NO: 5826 - DNA, 31 bp, artificial sequence
  misc_feature: DNAzyme
ttctgatgggctagctacaacgataggatcg

SEQ ID NO: 5827 - DNA, 31 bp, artificial sequence
  misc_feature: DNAzyme
agttctgaggctagctacaacgagttaggat

SEQ ID NO: 5828 - DNA, 31 bp, artificial sequence
  misc_feature: DNAzyme
taccccagggctagctacaacgatctgatgt

SEQ ID NO: 5829 - DNA, 31 bp, artificial sequence
  misc_feature: DNAzyme
ggtccttaggctagctacaacgacccagttc

SEQ ID NO: 5830 - DNA, 31 bp, artificial sequence
  misc_feature: DNAzyme
ggtgatggggctagctacaacgaccttaccc

SEQ ID NO: 5831 - DNA, 31 bp, artificial sequence
  misc_feature: DNAzyme
cgtggtgaggctagctacaacgaggtcctta

SEQ ID NO: 5832 - DNA, 31 bp, artificial sequence
  misc_feature: DNAzyme
gcccgtggggctagctacaacgagatggtcc

SEQ ID NO: 5833 - DNA, 31 bp, artificial sequence
  misc_feature: DNAzyme
ggcgcccgggctagctacaacgaggtgatgg

SEQ ID NO: 5834 - DNA, 31 bp, artificial sequence
  misc_feature: DNAzyme
tgggggcgggctagctacaacgaccgtggtg

SEQ ID NO: 5835 - DNA, 31 bp, artificial sequence
  misc_feature: DNAzyme
gatgggggggctagctacaacgagcccgtgg

SEQ ID NO: 5836 - DNA, 31 bp, artificial sequence
  misc_feature: DNAzyme
gtacgtgaggctagctacaacgagggggcgc

SEQ ID NO: 5837 - DNA, 31 bp, artificial sequence
  misc_feature: DNAzyme
ggagtacgggctagctacaacgagatggggg

SEQ ID NO: 5838 - DNA, 31 bp, artificial sequence
  misc_feature: DNAzyme
gtggagtaggctagctacaacgagtgatggg

SEQ ID NO: 5839 - DNA, 31 bp, artificial sequence
  misc_feature: DNAzyme
aggtggagggctagctacaacgaacgtgatg

SEQ ID NO: 5840 - DNA, 31 bp, artificial sequence
  misc_feature: DNAzyme
gccataggggctagctacaacgaggagtacg

SEQ ID NO: 5841 - DNA, 31 bp, artificial sequence
  misc_feature: DNAzyme
acttgccaggctagctacaacgaaggtggag

SEQ ID NO: 5842 - DNA, 31 bp, artificial sequence
  misc_feature: DNAzyme
ggaacttgggctagctacaacgacataggtg

SEQ ID NO: 5843 - DNA, 31 bp, artificial sequence
  misc_feature: DNAzyme
gcaaggaaggctagctacaacgattgccata

SEQ ID NO: 5844 - DNA, 31 bp, artificial sequence
  misc_feature: DNAzyme
accgtcggggctagctacaacgaaaggaact

SEQ ID NO: 5845 - DNA, 31 bp, artificial sequence
  misc_feature: DNAzyme
aaccaccgggctagctacaacgacggcaagg

SEQ ID NO: 5846 - DNA, 31 bp, artificial sequence
  misc_feature: DNAzyme
agcaaccaggctagctacaacgacgtcggca

SEQ ID NO: 5847 - DNA, 31 bp, artificial sequence
  misc_feature: DNAzyme
cagagcaaggctagctacaacgacaccgtcg

SEQ ID NO: 5848 - DNA, 31 bp, artificial sequence
  misc_feature: DNAzyme
ccccagagggctagctacaacgaaaccaccg

SEQ ID NO: 5849 - DNA, 31 bp, artificial sequence
  misc_feature: DNAzyme
cataggcgggctagctacaacgaccccagag

SEQ ID NO: 5850 - DNA, 31 bp, artificial sequence
  misc_feature: DNAzyme
gtcataggggctagctacaacgagcccccag

SEQ ID NO: 5851 - DNA, 31 bp, artificial sequence
  misc_feature: DNAzyme
tgatgtcaggctagctacaacgaaggcgccc

SEQ ID NO: 5852 - DNA, 31 bp, artificial sequence
  misc_feature: DNAzyme
ttatgatgggctagctacaacgacataggcg

SEQ ID NO: 5853 - DNA, 31 bp, artificial sequence
  misc_feature: DNAzyme
cattatgaggctagctacaacgagtcatagg

SEQ ID NO: 5854 - DNA, 31 bp, artificial sequence
  misc_feature: DNAzyme
acacattaggctagctacaacgagatgtcat

SEQ ID NO: 5855 - DNA, 31 bp, artificial sequence
  misc_feature: DNAzyme
atcacacaggctagctacaacgatatgatgt

SEQ ID NO: 5856 - DNA, 31 bp, artificial sequence
  misc_feature: DNAzyme
tcatcacaggctagctacaacgaattatgat

SEQ ID NO: 5857 - DNA, 31 bp, artificial sequence
  misc_feature: DNAzyme
actcatcaggctagctacaacgaacattatg

SEQ ID NO: 5858 - DNA, 31 bp, artificial sequence
  misc_feature: DNAzyme
ggcactcaggctagctacaacgacacacatt

SEQ ID NO: 5859 - DNA, 31 bp, artificial sequence
  misc_feature: DNAzyme
gagtggcaggctagctacaacgatcatcaca

SEQ ID NO: 5860 - DNA, 31 bp, artificial sequence
  misc_feature: DNAzyme
ttgagtggggctagctacaacgaactcatca

SEQ ID NO: 5861 - DNA, 31 bp, artificial sequence
  misc_feature: DNAzyme
caattgagggctagctacaacgaggcactca

SEQ ID NO: 5862 - DNA, 31 bp, artificial sequence
  misc_feature: DNAzyme
cgagtcaaggctagctacaacgatgagtggc

SEQ ID NO: 5863 - DNA, 31 bp, artificial sequence
  misc_feature: DNAzyme
aagtcgagggctagctacaacgacaattgag

SEQ ID NO: 5864 - DNA, 31 bp, artificial sequence
  misc_feature: DNAzyme
aatggaagggctagctacaacgacgagtcaa

SEQ ID NO: 5865 - DNA, 31 bp, artificial sequence
  misc_feature: DNAzyme
gcccaaaaggctagctacaacgaggaagtcg

SEQ ID NO: 5866 - DNA, 31 bp, artificial sequence
  misc_feature: DNAzyme
tgccgatgggctagctacaacgaccaaaatg

SEQ ID NO: 5867 - DNA, 31 bp, artificial sequence
  misc_feature: DNAzyme
tgtgccgaggctagctacaacgagcccaaaa

SEQ ID NO: 5868 - DNA, 31 bp, artificial sequence
  misc_feature: DNAzyme
ggactgtgggctagctacaacgacgatgccc

SEQ ID NO: 5869 - DNA, 31 bp, artificial sequence
  misc_feature: DNAzyme
caggactgggctagctacaacgagccgatgc

SEQ ID NO: 5870 - DNA, 31 bp, artificial sequence
  misc_feature: DNAzyme
gtccaggaggctagctacaacgatgtgccga

SEQ ID NO: 5871 - DNA, 31 bp, artificial sequence
  misc_feature: DNAzyme
ccgcttggggctagctacaacgaccaggact

SEQ ID NO: 5872 - DNA, 31 bp, artificial sequence
  misc_feature: DNAzyme
cgtctccgggctagctacaacgattggtcca

SEQ ID NO: 5873 - DNA, 31 bp, artificial sequence
  misc_feature: DNAzyme
tccagccgggctagctacaacgactccgctt

SEQ ID NO: 5874 - DNA, 31 bp, artificial sequence
  misc_feature: DNAzyme
cgctccagggctagctacaacgacgtctccg

SEQ ID NO: 5875 - DNA, 31 bp, artificial sequence
  misc_feature: DNAzyme
gagccgcgggctagctacaacgatccagccg

SEQ ID NO: 5876 - DNA, 31 bp, artificial sequence
  misc_feature: DNAzyme
acgagccgggctagctacaacgagctccagc

SEQ ID NO: 5877 - DNA, 31 bp, artificial sequence
  misc_feature: DNAzyme
acgacgagggctagctacaacgacgcgctcc

SEQ ID NO: 5878 - DNA, 31 bp, artificial sequence
  misc_feature: DNAzyme
gagcacgaggctagctacaacgagagccgcg

SEQ ID NO: 5879 - DNA, 31 bp, artificial sequence
  misc_feature: DNAzyme
ggcgagcaggctagctacaacgagacgagcc

SEQ ID NO: 5880 - DNA, 31 bp, artificial sequence
  misc_feature: DNAzyme
gtggcgagggctagctacaacgaacgacgag

SEQ ID NO: 5881 - DNA, 31 bp, artificial sequence
  misc_feature: DNAzyme
agcggtggggctagctacaacgagagcacga

SEQ ID NO: 5882 - DNA, 31 bp, artificial sequence
  misc_feature: DNAzyme
cgtagcggggctagctacaacgaggcgagca

SEQ ID NO: 5883 - DNA, 31 bp, artificial sequence
  misc_feature: DNAzyme
aggcgtagggctagctacaacgaggtggcga

SEQ ID NO: 5884 - DNA, 31 bp, artificial sequence
  misc_feature: DNAzyme
cggaggcgggctagctacaacgaagcggtgg

SEQ ID NO: 5885 - DNA, 31 bp, artificial sequence
  misc_feature: DNAzyme
cccggaggggctagctacaacgagtagcggt

SEQ ID NO: 5886 - DNA, 31 bp, artificial sequence
  misc_feature: DNAzyme
gtgaccgaggctagctacaacgacccggagg

SEQ ID NO: 5887 - DNA, 31 bp, artificial sequence
  misc_feature: DNAzyme
cacggtgaggctagctacaacgacgatcccg

SEQ ID NO: 5888 - DNA, 31 bp, artificial sequence
  misc_feature: DNAzyme
tggcacggggctagctacaacgagaccgatc

SEQ ID NO: 5889 - DNA, 31 bp, artificial sequence
  misc_feature: DNAzyme
atgtggcaggctagctacaacgaggtgaccg

SEQ ID NO: 5890 - DNA, 31 bp, artificial sequence
  misc_feature: DNAzyme
ggatgtggggctagctacaacgaacggtgac

SEQ ID NO: 5891 - DNA, 31 bp, artificial sequence
  misc_feature: DNAzyme
ttgggatgggctagctacaacgaggcacggt

SEQ ID NO: 5892 - DNA, 31 bp, artificial sequence
  misc_feature: DNAzyme
tgttgggaggctagctacaacgagtggcacg

SEQ ID NO: 5893 - DNA, 31 bp, artificial sequence
  misc_feature: DNAzyme
cctcgatgggctagctacaacgatgggatgt

SEQ ID NO: 5894 - DNA, 31 bp, artificial sequence
  misc_feature: DNAzyme
ctcctcgaggctagctacaacgagttgggat

SEQ ID NO: 5895 - DNA, 31 bp, artificial sequence
  misc_feature: DNAzyme
caaggctaggctagctacaacgactcctcga

SEQ ID NO: 5896 - DNA, 31 bp, artificial sequence
  misc_feature: DNAzyme
ggacaaggggctagctacaacgatatctcct

SEQ ID NO: 5897 - DNA, 31 bp, artificial sequence
  misc_feature: DNAzyme
gtgttggaggctagctacaacgaaaggctat

SEQ ID NO: 5898 - DNA, 31 bp, artificial sequence
  misc_feature: DNAzyme
ctccggtgggctagctacaacgatggacaag

SEQ ID NO: 5899 - DNA, 31 bp, artificial sequence
  misc_feature: DNAzyme
ctctccggggctagctacaacgagttggaca

SEQ ID NO: 5900 - DNA, 31 bp, artificial sequence
  misc_feature: DNAzyme
gaaggggaggctagctacaacgactctccgg

SEQ ID NO: 5901 - DNA, 31 bp, artificial sequence
  misc_feature: DNAzyme
ctttgccaggctagctacaacgaagaagggg

SEQ ID NO: 5902 - DNA, 31 bp, artificial sequence
  misc_feature: DNAzyme
tggctttgggctagctacaacgacatagaag

SEQ ID NO: 5903 - DNA, 31 bp, artificial sequence
  misc_feature: DNAzyme
ggggatggggctagctacaacgatttgccat

SEQ ID NO: 5904 - DNA, 31 bp, artificial sequence
  misc_feature: DNAzyme
gatggggaggctagctacaacgaggctttgc

SEQ ID NO: 5905 - DNA, 31 bp, artificial sequence
  misc_feature: DNAzyme
ggtctcgaggctagctacaacgaggggatgg

SEQ ID NO: 5906 - DNA, 31 bp, artificial sequence
  misc_feature: DNAzyme
tttgatggggctagctacaacgactcgatgg

SEQ ID NO: 5907 - DNA, 31 bp, artificial sequence
  misc_feature: DNAzyme
ccctttgaggctagctacaacgaggtctcga

SEQ ID NO: 5908 - DNA, 31 bp, artificial sequence
  misc_feature: DNAzyme
atgagatgggctagctacaacgactcccccc

SEQ ID NO: 5909 - DNA, 31 bp, artificial sequence
  misc_feature: DNAzyme
agatgagaggctagctacaacgagcctcccc

SEQ ID NO: 5910 - DNA, 31 bp, artificial sequence
  misc_feature: DNAzyme
gcagaagaggctagctacaacgagagatgcc

SEQ ID NO: 5911 - DNA, 31 bp, artificial sequence
  misc_feature: DNAzyme
tggaatggggctagctacaacgaagaagatg

SEQ ID NO: 5912 - DNA, 31 bp, artificial sequence
  misc_feature: DNAzyme
tcttggaaggctagctacaacgaggcagaag

SEQ ID NO: 5913 - DNA, 31 bp, artificial sequence
  misc_feature: DNAzyme
tcgtcacaggctagctacaacgattcttctt

SEQ ID NO: 5914 - DNA, 31 bp, artificial sequence
  misc_feature: DNAzyme
gctcgtcaggctagctacaacgaatttcttc

SEQ ID NO: 5915 - DNA, 31 bp, artificial sequence
  misc_feature: DNAzyme
cgagctcgggctagctacaacgacacatttc

SEQ ID NO: 5916 - DNA, 31 bp, artificial sequence
  misc_feature: DNAzyme
gcagcgagggctagctacaacgatcgtcaca

SEQ ID NO: 5917 - DNA, 31 bp, artificial sequence
  misc_feature: DNAzyme
ctttgcagggctagctacaacgagagctcgt

SEQ ID NO: 5918 - DNA, 31 bp, artificial sequence
  misc_feature: DNAzyme
cagctttgggctagctacaacgaagcgagct

SEQ ID NO: 5919 - DNA, 31 bp, artificial sequence
  misc_feature: DNAzyme
cccgacagggctagctacaacgatttgcagc

SEQ ID NO: 5920 - DNA, 31 bp, artificial sequence
  misc_feature: DNAzyme
aggcccgaggctagctacaacgaagctttgc

SEQ ID NO: 5921 - DNA, 31 bp, artificial sequence
  misc_feature: DNAzyme
gtccgaggggctagctacaacgaccgacagc

SEQ ID NO: 5922 - DNA, 31 bp, artificial sequence
  misc_feature: DNAzyme
gcgttaagggctagctacaacgaccgaggcc

SEQ ID NO: 5923 - DNA, 31 bp, artificial sequence
  misc_feature: DNAzyme
ctacagcgggctagctacaacgataagtccg

SEQ ID NO: 5924 - DNA, 31 bp, artificial sequence
  misc_feature: DNAzyme
cgctacagggctagctacaacgagttaagtc

SEQ ID NO: 5925 - DNA, 31 bp, artificial sequence
  misc_feature: DNAzyme
atacgctaggctagctacaacgaagcgttaa

SEQ ID NO: 5926 - DNA, 31 bp, artificial sequence
  misc_feature: DNAzyme
gtaatacgggctagctacaacgatacagcgt

SEQ ID NO: 5927 - DNA, 31 bp, artificial sequence
  misc_feature: DNAzyme
cggtaataggctagctacaacgagctacagc

SEQ ID NO: 5928 - DNA, 31 bp, artificial sequence
  misc_feature: DNAzyme
cccggtaaggctagctacaacgaacgctaca

SEQ ID NO: 5929 - DNA, 31 bp, artificial sequence
  misc_feature: DNAzyme
gaccccggggctagctacaacgaaatacgct

SEQ ID NO: 5930 - DNA, 31 bp, artificial sequence
  misc_feature: DNAzyme
cgtcgagaggctagctacaacgacccggtaa

SEQ ID NO: 5931 - DNA, 31 bp, artificial sequence
  misc_feature: DNAzyme
cggacacgggctagctacaacgacgagaccc

SEQ ID NO: 5932 - DNA, 31 bp, artificial sequence
  misc_feature: DNAzyme
gacggacaggctagctacaacgagtcgagac

SEQ ID NO: 5933 - DNA, 31 bp, artificial sequence
  misc_feature: DNAzyme
atgacggaggctagctacaacgaacgtcgag

SEQ ID NO: 5934 - DNA, 31 bp, artificial sequence
  misc_feature: DNAzyme
cggtatgaggctagctacaacgaggacacgt

SEQ ID NO: 5935 - DNA, 31 bp, artificial sequence
  misc_feature: DNAzyme
ggccggtaggctagctacaacgagacggaca

SEQ ID NO: 5936 - DNA, 31 bp, artificial sequence
  misc_feature: DNAzyme
ctggccggggctagctacaacgaatgacgga

SEQ ID NO: 5937 - DNA, 31 bp, artificial sequence
  misc_feature: DNAzyme
cccgctggggctagctacaacgacggtatga

SEQ ID NO: 5938 - DNA, 31 bp, artificial sequence
  misc_feature: DNAzyme
cgtccccgggctagctacaacgatggccggt

SEQ ID NO: 5939 - DNA, 31 bp, artificial sequence
  misc_feature: DNAzyme
caacgacgggctagctacaacgaccccgctg

SEQ ID NO: 5940 - DNA, 31 bp, artificial sequence
  misc_feature: DNAzyme
gacaacgaggctagctacaacgagtccccgc

SEQ ID NO: 5941 - DNA, 31 bp, artificial sequence
  misc_feature: DNAzyme
cacgacaaggctagctacaacgagacgtccc

SEQ ID NO: 5942 - DNA, 31 bp, artificial sequence
  misc_feature: DNAzyme
tgccacgaggctagctacaacgaaacgacgt

SEQ ID NO: 5943 - DNA, 31 bp, artificial sequence
  misc_feature: DNAzyme
tgttgccaggctagctacaacgagacaacga

SEQ ID NO: 5944 - DNA, 31 bp, artificial sequence
  misc_feature: DNAzyme
gtctgttgggctagctacaacgacacgacaa

SEQ ID NO: 5945 - DNA, 31 bp, artificial sequence
  misc_feature: DNAzyme
agcgtctgggctagctacaacgatgccacga

SEQ ID NO: 5946 - DNA, 31 bp, artificial sequence
  misc_feature: DNAzyme
ttagagcgggctagctacaacgactgttgcc

SEQ ID NO: 5947 - DNA, 31 bp, artificial sequence
  misc_feature: DNAzyme
cattagagggctagctacaacgagtctgttg

SEQ ID NO: 5948 - DNA, 31 bp, artificial sequence
  misc_feature: DNAzyme
gcccgtcaggctagctacaacgatagagcgt

SEQ ID NO: 5949 - DNA, 31 bp, artificial sequence
  misc_feature: DNAzyme
atagcccgggctagctacaacgacattagag

SEQ ID NO: 5950 - DNA, 31 bp, artificial sequence
  misc_feature: DNAzyme
cggtatagggctagctacaacgaccgtcatt

SEQ ID NO: 5951 - DNA, 31 bp, artificial sequence
  misc_feature: DNAzyme
cgccggtaggctagctacaacgaagcccgtc

SEQ ID NO: 5952 - DNA, 31 bp, artificial sequence
  misc_feature: DNAzyme
atcgccggggctagctacaacgaatagcccg

SEQ ID NO: 5953 - DNA, 31 bp, artificial sequence
  misc_feature: DNAzyme
caaaatcgggctagctacaacgacggtatag

SEQ ID NO: 5954 - DNA, 31 bp, artificial sequence
  misc_feature: DNAzyme
agtcaaaaggctagctacaacgacgccggta

SEQ ID NO: 5955 - DNA, 31 bp, artificial sequence
  misc_feature: DNAzyme
tcaccgagggctagctacaacgacaaaatcg

SEQ ID NO: 5956 - DNA, 31 bp, artificial sequence
  misc_feature: DNAzyme
gtcgatcaggctagctacaacgacgagtcaa

SEQ ID NO: 5957 - DNA, 31 bp, artificial sequence
  misc_feature: DNAzyme
acagtcgaggctagctacaacgacaccgagt

SEQ ID NO: 5958 - DNA, 31 bp, artificial sequence
  misc_feature: DNAzyme
tattacagggctagctacaacgacgatcacc

SEQ ID NO: 5959 - DNA, 31 bp, artificial sequence
  misc_feature: DNAzyme
atgtattaggctagctacaacgaagtcgatc

SEQ ID NO: 5960 - DNA, 31 bp, artificial sequence
  misc_feature: DNAzyme
cacatgtaggctagctacaacgatacagtcg

SEQ ID NO: 5961 - DNA, 31 bp, artificial sequence
  misc_feature: DNAzyme
gacacatgggctagctacaacgaattacagt

SEQ ID NO: 5962 - DNA, 31 bp, artificial sequence
  misc_feature: DNAzyme
gtgacacaggctagctacaacgagtattaca

SEQ ID NO: 5963 - DNA, 31 bp, artificial sequence
  misc_feature: DNAzyme
gggtgacaggctagctacaacgaatgtatta

SEQ ID NO: 5964 - DNA, 31 bp, artificial sequence
  misc_feature: DNAzyme
ttgggtgaggctagctacaacgaacatgtat

SEQ ID NO: 5965 - DNA, 31 bp, artificial sequence
  misc_feature: DNAzyme
tgtttgggggctagctacaacgagacacatg

SEQ ID NO: 5966 - DNA, 31 bp, artificial sequence
  misc_feature: DNAzyme
gtcgactgggctagctacaacgattgggtga

SEQ ID NO: 5967 - DNA, 31 bp, artificial sequence
  misc_feature: DNAzyme
gaagtcgaggctagctacaacgatgtttggg

SEQ ID NO: 5968 - DNA, 31 bp, artificial sequence
  misc_feature: DNAzyme
agctgaagggctagctacaacgacgactgtt

SEQ ID NO: 5969 - DNA, 31 bp, artificial sequence
  misc_feature: DNAzyme
ggtccaagggctagctacaacgatgaagtcg

SEQ ID NO: 5970 - DNA, 31 bp, artificial sequence
  misc_feature: DNAzyme
aggtagggggctagctacaacgaccaagctg

SEQ ID NO: 5971 - DNA, 31 bp, artificial sequence
  misc_feature: DNAzyme
ggtgaaggggctagctacaacgaagggtcca

SEQ ID NO: 5972 - DNA, 31 bp, artificial sequence
  misc_feature: DNAzyme
ctcaatggggctagctacaacgagaaggtag

SEQ ID NO: 5973 - DNA, 31 bp, artificial sequence
  misc_feature: DNAzyme
cgtctcaaggctagctacaacgaggtgaagg

SEQ ID NO: 5974 - DNA, 31 bp, artificial sequence
  misc_feature: DNAzyme
ggtcgtcgggctagctacaacgactcaatgg

SEQ ID NO: 5975 - DNA, 31 bp, artificial sequence
  misc_feature: DNAzyme
cacggtcgggctagctacaacgacgtctcaa

SEQ ID NO: 5976 - DNA, 31 bp, artificial sequence
  misc_feature: DNAzyme
gggcacggggctagctacaacgacgtcgtct

SEQ ID NO: 5977 - DNA, 31 bp, artificial sequence
  misc_feature: DNAzyme
ttggggcaggctagctacaacgaggtcgtcg

SEQ ID NO: 5978 - DNA, 31 bp, artificial sequence
  misc_feature: DNAzyme
tcttggggggctagctacaacgaacggtcgt

SEQ ID NO: 5979 - DNA, 31 bp, artificial sequence
  misc_feature: DNAzyme
acactgcgggctagctacaacgacttggggc

SEQ ID NO: 5980 - DNA, 31 bp, artificial sequence
  misc_feature: DNAzyme
ggacactgggctagctacaacgagtcttggg

SEQ ID NO: 5981 - DNA, 31 bp, artificial sequence
  misc_feature: DNAzyme
gcgggacaggctagctacaacgatgcgtctt

SEQ ID NO: 5982 - DNA, 31 bp, artificial sequence
  misc_feature: DNAzyme
gagcgggaggctagctacaacgaactgcgtc

SEQ ID NO: 5983 - DNA, 31 bp, artificial sequence
  misc_feature: DNAzyme
tctgcgagggctagctacaacgagggacact

SEQ ID NO: 5984 - DNA, 31 bp, artificial sequence
  misc_feature: DNAzyme
cgcctctgggctagctacaacgagagcggga

SEQ ID NO: 5985 - DNA, 31 bp, artificial sequence
  misc_feature: DNAzyme
ctacctcgggctagctacaacgactctgcga

SEQ ID NO: 5986 - DNA, 31 bp, artificial sequence
  misc_feature: DNAzyme
cggtcctaggctagctacaacgactcgcctc

SEQ ID NO: 5987 - DNA, 31 bp, artificial sequence
  misc_feature: DNAzyme
cctaccggggctagctacaacgacctacctc

SEQ ID NO: 5988 - DNA, 31 bp, artificial sequence
  misc_feature: DNAzyme
tgcccctaggctagctacaacgacggtccta

SEQ ID NO: 5989 - DNA, 31 bp, artificial sequence
  misc_feature: DNAzyme
ctctcctgggctagctacaacgaccctaccg

SEQ ID NO: 5990 - DNA, 31 bp, artificial sequence
  misc_feature: DNAzyme
tgtatatgggctagctacaacgactctcctg

SEQ ID NO: 5991 - DNA, 31 bp, artificial sequence
  misc_feature: DNAzyme
cctgtataggctagctacaacgagcctctcc

SEQ ID NO: 5992 - DNA, 31 bp, artificial sequence
  misc_feature: DNAzyme
aacctgtaggctagctacaacgaatgcctct

SEQ ID NO: 5993 - DNA, 31 bp, artificial sequence
  misc_feature: DNAzyme
caaacctgggctagctacaacgaatatgcct

SEQ ID NO: 5994 - DNA, 31 bp, artificial sequence
  misc_feature: DNAzyme
gtcacaaaggctagctacaacgactgtatat

SEQ ID NO: 5995 - DNA, 31 bp, artificial sequence
  misc_feature: DNAzyme
tggagtcaggctagctacaacgaaaacctgt

SEQ ID NO: 5996 - DNA, 31 bp, artificial sequence
  misc_feature: DNAzyme
tcctggagggctagctacaacgacacaaacc

SEQ ID NO: 5997 - DNA, 31 bp, artificial sequence
  misc_feature: DNAzyme
gaaggccgggctagctacaacgatctcctgg

SEQ ID NO: 5998 - DNA, 31 bp, artificial sequence
  misc_feature: DNAzyme
cccgaaggggctagctacaacgacgctctcc

SEQ ID NO: 5999 - DNA, 31 bp, artificial sequence
  misc_feature: DNAzyme
cgaacatgggctagctacaacgaccgaaggc

SEQ ID NO: 6000 - DNA, 31 bp, artificial sequence
  misc_feature: DNAzyme
gtcgaacaggctagctacaacgagcccgaag

SEQ ID NO: 6001 - DNA, 31 bp, artificial sequence
  misc_feature: DNAzyme
gagtcgaaggctagctacaacgaatgcccga

SEQ ID NO: 6002 - DNA, 31 bp, artificial sequence
  misc_feature: DNAzyme
ccgaggagggctagctacaacgacgaacatg

SEQ ID NO: 6003 - DNA, 31 bp, artificial sequence
  misc_feature: DNAzyme
acacaggaggctagctacaacgacgaggagt

SEQ ID NO: 6004 - DNA, 31 bp, artificial sequence
  misc_feature: DNAzyme
cactcacaggctagctacaacgaaggaccga

SEQ ID NO: 6005 - DNA, 31 bp, artificial sequence
  misc_feature: DNAzyme
agcactcaggctagctacaacgaacaggacc

SEQ ID NO: 6006 - DNA, 31 bp, artificial sequence
  misc_feature: DNAzyme
tcatagcaggctagctacaacgatcacacag

SEQ ID NO: 6007 - DNA, 31 bp, artificial sequence
  misc_feature: DNAzyme
cgtcatagggctagctacaacgaactcacac

SEQ ID NO: 6008 - DNA, 31 bp, artificial sequence
  misc_feature: DNAzyme
ccgcgtcaggctagctacaacgaagcactca

SEQ ID NO: 6009 - DNA, 31 bp, artificial sequence
  misc_feature: DNAzyme
atcccgcgggctagctacaacgacatagcac

SEQ ID NO: 6010 - DNA, 31 bp, artificial sequence
  misc_feature: DNAzyme
acatcccgggctagctacaacgagtcatagc

SEQ ID NO: 6011 - DNA, 31 bp, artificial sequence
  misc_feature: DNAzyme
caagcacaggctagctacaacgacccgcgtc

SEQ ID NO: 6012 - DNA, 31 bp, artificial sequence
  misc_feature: DNAzyme
accaagcaggctagctacaacgaatcccgcg

SEQ ID NO: 6013 - DNA, 31 bp, artificial sequence
  misc_feature: DNAzyme
gtaccaagggctagctacaacgaacatcccg

SEQ ID NO: 6014 - DNA, 31 bp, artificial sequence
  misc_feature: DNAzyme
agctcgtaggctagctacaacgacaagcaca

SEQ ID NO: 6015 - DNA, 31 bp, artificial sequence
  misc_feature: DNAzyme
tgagctcgggctagctacaacgaaccaagca

SEQ ID NO: 6016 - DNA, 31 bp, artificial sequence
  misc_feature: DNAzyme
ggcgtgagggctagctacaacgatcgtacca

SEQ ID NO: 6017 - DNA, 31 bp, artificial sequence
  misc_feature: DNAzyme
ggcgggcgggctagctacaacgagagctcgt

SEQ ID NO: 6018 - DNA, 31 bp, artificial sequence
  misc_feature: DNAzyme
tcggcgggggctagctacaacgagtgagctc

SEQ ID NO: 6019 - DNA, 31 bp, artificial sequence
  misc_feature: DNAzyme
ggtctcggggctagctacaacgagggcgtga

SEQ ID NO: 6020 - DNA, 31 bp, artificial sequence
  misc_feature: DNAzyme
aacggaggggctagctacaacgactcggcgg

SEQ ID NO: 6021 - DNA, 31 bp, artificial sequence
  misc_feature: DNAzyme
caacctaaggctagctacaacgaggaggtct

SEQ ID NO: 6022 - DNA, 31 bp, artificial sequence
  misc_feature: DNAzyme
gcccgcaaggctagctacaacgactaacgga

SEQ ID NO: 6023 - DNA, 31 bp, artificial sequence
  misc_feature: DNAzyme
taagcccgggctagctacaacgaaacctaac

SEQ ID NO: 6024 - DNA, 31 bp, artificial sequence
  misc_feature: DNAzyme
taggtaagggctagctacaacgaccgcaacc

SEQ ID NO: 6025 - DNA, 31 bp, artificial sequence
  misc_feature: DNAzyme
tatttaggggctagctacaacgaaagcccgc

SEQ ID NO: 6026 - DNA, 31 bp, artificial sequence
  misc_feature: DNAzyme
ctggtgtaggctagctacaacgattaggtaa

SEQ ID NO: 6027 - DNA, 31 bp, artificial sequence
  misc_feature: DNAzyme
ccctggtgggctagctacaacgaatttaggt

SEQ ID NO: 6028 - DNA, 31 bp, artificial sequence
  misc_feature: DNAzyme
aaccctggggctagctacaacgagtatttag

SEQ ID NO: 6029 - DNA, 31 bp, artificial sequence
  misc_feature: DNAzyme
aagggcaaggctagctacaacgacctggtgt

SEQ ID NO: 6030 - DNA, 31 bp, artificial sequence
  misc_feature: DNAzyme
cagaagggggctagctacaacgaaaccctgg

SEQ ID NO: 6031 - DNA, 31 bp, artificial sequence
  misc_feature: DNAzyme
ggtcctggggctagctacaacgaagaagggc

SEQ ID NO: 6032 - DNA, 31 bp, artificial sequence
  misc_feature: DNAzyme
ccagatggggctagctacaacgacctggcag

SEQ ID NO: 6033 - DNA, 31 bp, artificial sequence
  misc_feature: DNAzyme
actccagaggctagctacaacgaggtcctgg

SEQ ID NO: 6034 - DNA, 31 bp, artificial sequence
  misc_feature: DNAzyme
tcccagaaggctagctacaacgatccagatg

SEQ ID NO: 6035 - DNA, 31 bp, artificial sequence
  misc_feature: DNAzyme
tgaagacaggctagctacaacgacctcccag

SEQ ID NO: 6036 - DNA, 31 bp, artificial sequence
  misc_feature: DNAzyme
tgtgaagaggctagctacaacgaaccctccc

SEQ ID NO: 6037 - DNA, 31 bp, artificial sequence
  misc_feature: DNAzyme
gaggcctgggctagctacaacgagaagacac

SEQ ID NO: 6038 - DNA, 31 bp, artificial sequence
  misc_feature: DNAzyme
gggtgaggggctagctacaacgactgtgaag

SEQ ID NO: 6039 - DNA, 31 bp, artificial sequence
  misc_feature: DNAzyme
tatgtgggggctagctacaacgagaggcctg

SEQ ID NO: 6040 - DNA, 31 bp, artificial sequence
  misc_feature: DNAzyme
catctatgggctagctacaacgagggtgagg

SEQ ID NO: 6041 - DNA, 31 bp, artificial sequence
  misc_feature: DNAzyme
ggcatctaggctagctacaacgagtgggtga

SEQ ID NO: 6042 - DNA, 31 bp, artificial sequence
  misc_feature: DNAzyme
agtgggcaggctagctacaacgactatgtgg

SEQ ID NO: 6043 - DNA, 31 bp, artificial sequence
  misc_feature: DNAzyme
gaagtgggggctagctacaacgaatctatgt

SEQ ID NO: 6044 - DNA, 31 bp, artificial sequence
  misc_feature: DNAzyme
acaagaagggctagctacaacgagggcatct

SEQ ID NO: 6045 - DNA, 31 bp, artificial sequence
  misc_feature: DNAzyme
gtctgggaggctagctacaacgaaagaagtg

SEQ ID NO: 6046 - DNA, 31 bp, artificial sequence
  misc_feature: DNAzyme
ctgcttggggctagctacaacgactgggaca

SEQ ID NO: 6047 - DNA, 31 bp, artificial sequence
  misc_feature: DNAzyme
cctgcctgggctagctacaacgattggtctg

SEQ ID NO: 6048 - DNA, 31 bp, artificial sequence
  misc_feature: DNAzyme
ttctcctgggctagctacaacgactgcttgg

SEQ ID NO: 6049 - DNA, 31 bp, artificial sequence
  misc_feature: DNAzyme
aggggaggggctagctacaacgatttctcct

SEQ ID NO: 6050 - DNA, 31 bp, artificial sequence
  misc_feature: DNAzyme
ctaccaggggctagctacaacgaaggggagg

SEQ ID NO: 6051 - DNA, 31 bp, artificial sequence
  misc_feature: DNAzyme
gtatgctaggctagctacaacgacaggtagg

SEQ ID NO: 6052 - DNA, 31 bp, artificial sequence
  misc_feature: DNAzyme
ttggtatgggctagctacaacgataccaggt

SEQ ID NO: 6053 - DNA, 31 bp, artificial sequence
  misc_feature: DNAzyme
gcttggtaggctagctacaacgagctaccag

SEQ ID NO: 6054 - DNA, 31 bp, artificial sequence
  misc_feature: DNAzyme
tggcttggggctagctacaacgaatgctacc

SEQ ID NO: 6055 - DNA, 31 bp, artificial sequence
  misc_feature: DNAzyme
cactgtggggctagctacaacgattggtatg

SEQ ID NO: 6056 - DNA, 31 bp, artificial sequence
  misc_feature: DNAzyme
gcacactgggctagctacaacgaggcttggt

SEQ ID NO: 6057 - DNA, 31 bp, artificial sequence
  misc_feature: DNAzyme
ggcgcacaggctagctacaacgatgtggctt

SEQ ID NO: 6058 - DNA, 31 bp, artificial sequence
  misc_feature: DNAzyme
ctggcgcaggctagctacaacgaactgtggc

SEQ ID NO: 6059 - DNA, 31 bp, artificial sequence
  misc_feature: DNAzyme
ccctggcgggctagctacaacgaacactgtg

SEQ ID NO: 6060 - DNA, 31 bp, artificial sequence
  misc_feature: DNAzyme
agccctggggctagctacaacgagcacactg

SEQ ID NO: 6061 - DNA, 31 bp, artificial sequence
  misc_feature: DNAzyme
agcctgagggctagctacaacgacctggcgc

SEQ ID NO: 6062 - DNA, 31 bp, artificial sequence
  misc_feature: DNAzyme
gggtggagggctagctacaacgactgagccc

SEQ ID NO: 6063 - DNA, 31 bp, artificial sequence
  misc_feature: DNAzyme
gatgggggggctagctacaacgaggagcctg

SEQ ID NO: 6064 - DNA, 31 bp, artificial sequence
  misc_feature: DNAzyme
tcccacgaggctagctacaacgagggggtgg

SEQ ID NO: 6065 - DNA, 31 bp, artificial sequence
  misc_feature: DNAzyme
tgatcccaggctagctacaacgagatggggg

SEQ ID NO: 6066 - DNA, 31 bp, artificial sequence
  misc_feature: DNAzyme
acatttgaggctagctacaacgacccacgat

SEQ ID NO: 6067 - DNA, 31 bp, artificial sequence
  misc_feature: DNAzyme
cttccacaggctagctacaacgattgatccc

SEQ ID NO: 6068 - DNA, 31 bp, artificial sequence
  misc_feature: DNAzyme
cacttccaggctagctacaacgaatttgatc

SEQ ID NO: 6069 - DNA, 31 bp, artificial sequence
  misc_feature: DNAzyme
gtgagacaggctagctacaacgattccacat

SEQ ID NO: 6070 - DNA, 31 bp, artificial sequence
  misc_feature: DNAzyme
gtgtgagaggctagctacaacgaacttccac

SEQ ID NO: 6071 - DNA, 31 bp, artificial sequence
  misc_feature: DNAzyme
tagccgtgggctagctacaacgagagacact

SEQ ID NO: 6072 - DNA, 31 bp, artificial sequence
  misc_feature: DNAzyme
tttagccgggctagctacaacgagtgagaca

SEQ ID NO: 6073 - DNA, 31 bp, artificial sequence
  misc_feature: DNAzyme
ggctttagggctagctacaacgacgtgtgag

SEQ ID NO: 6074 - DNA, 31 bp, artificial sequence
  misc_feature: DNAzyme
agcgtaggggctagctacaacgatttagccg

SEQ ID NO: 6075 - DNA, 31 bp, artificial sequence
  misc_feature: DNAzyme
gtgtagcgggctagctacaacgaaggcttta

SEQ ID NO: 6076 - DNA, 31 bp, artificial sequence
  misc_feature: DNAzyme
ccgtgtagggctagctacaacgagtaggctt

SEQ ID NO: 6077 - DNA, 31 bp, artificial sequence
  misc_feature: DNAzyme
ggcccgtgggctagctacaacgaagcgtagg

SEQ ID NO: 6078 - DNA, 31 bp, artificial sequence
  misc_feature: DNAzyme
ttggcccgggctagctacaacgagtagcgta

SEQ ID NO: 6079 - DNA, 31 bp, artificial sequence
  misc_feature: DNAzyme
ggtgttggggctagctacaacgaccgtgtag

SEQ ID NO: 6080 - DNA, 31 bp, artificial sequence
  misc_feature: DNAzyme
caggggtgggctagctacaacgatggcccgt

SEQ ID NO: 6081 - DNA, 31 bp, artificial sequence
  misc_feature: DNAzyme
agcaggggggctagctacaacgagttggccc

SEQ ID NO: 6082 - DNA, 31 bp, artificial sequence
  misc_feature: DNAzyme
ctatacagggctagctacaacgaaggggtgt

SEQ ID NO: 6083 - DNA, 31 bp, artificial sequence
  misc_feature: DNAzyme
agcctataggctagctacaacgaagcagggg

SEQ ID NO: 6084 - DNA, 31 bp, artificial sequence
  misc_feature: DNAzyme
ctagcctaggctagctacaacgaacagcagg

SEQ ID NO: 6085 - DNA, 31 bp, artificial sequence
  misc_feature: DNAzyme
gctcctagggctagctacaacgactatacag

SEQ ID NO: 6086 - DNA, 31 bp, artificial sequence
  misc_feature: DNAzyme
ttggacggggctagctacaacgatcctagcc

SEQ ID NO: 6087 - DNA, 31 bp, artificial sequence
  misc_feature: DNAzyme
attttggaggctagctacaacgaggctccta

SEQ ID NO: 6088 - DNA, 31 bp, artificial sequence
  misc_feature: DNAzyme
tgacatcaggctagctacaacgatttggacg

SEQ ID NO: 6089 - DNA, 31 bp, artificial sequence
  misc_feature: DNAzyme
gggtgacaggctagctacaacgacattttgg

SEQ ID NO: 6090 - DNA, 31 bp, artificial sequence
  misc_feature: DNAzyme
gagggtgaggctagctacaacgaatcatttt

SEQ ID NO: 6091 - DNA, 31 bp, artificial sequence
  misc_feature: DNAzyme
tgtgagggggctagctacaacgagacatcat

SEQ ID NO: 6092 - DNA, 31 bp, artificial sequence
  misc_feature: DNAzyme
ggggtgtgggctagctacaacgagagggtga

SEQ ID NO: 6093 - DNA, 31 bp, artificial sequence
  misc_feature: DNAzyme
atggggtgggctagctacaacgagtgagggt

SEQ ID NO: 6094 - DNA, 31 bp, artificial sequence
  misc_feature: DNAzyme
ttatggggggctagctacaacgagtgtgagg

SEQ ID NO: 6095 - DNA, 31 bp, artificial sequence
  misc_feature: DNAzyme
tttggttaggctagctacaacgaggggtgtg

SEQ ID NO: 6096 - DNA, 31 bp, artificial sequence
  misc_feature: DNAzyme
gtatttggggctagctacaacgatatggggt

SEQ ID NO: 6097 - DNA, 31 bp, artificial sequence
  misc_feature: DNAzyme
atgatgtaggctagctacaacgattggttat

SEQ ID NO: 6098 - DNA, 31 bp, artificial sequence
  misc_feature: DNAzyme
tcatgatgggctagctacaacgaatttggtt

SEQ ID NO: 6099 - DNA, 31 bp, artificial sequence
  misc_feature: DNAzyme
tgtcatgaggctagctacaacgagtatttgg

SEQ ID NO: 6100 - DNA, 31 bp, artificial sequence
  misc_feature: DNAzyme
gcatgtcaggctagctacaacgagatgtatt

SEQ ID NO: 6101 - DNA, 31 bp, artificial sequence
  misc_feature: DNAzyme
catgcatgggctagctacaacgacatgatgt

SEQ ID NO: 6102 - DNA, 31 bp, artificial sequence
  misc_feature: DNAzyme
gacatgcaggctagctacaacgagtcatgat

SEQ ID NO: 6103 - DNA, 31 bp, artificial sequence
  misc_feature: DNAzyme
ccgacatgggctagctacaacgaatgtcatg

SEQ ID NO: 6104 - DNA, 31 bp, artificial sequence
  misc_feature: DNAzyme
agccgacaggctagctacaacgagcatgtca

SEQ ID NO: 6105 - DNA, 31 bp, artificial sequence
  misc_feature: DNAzyme
tcagccgaggctagctacaacgaatgcatgt

SEQ ID NO: 6106 - DNA, 31 bp, artificial sequence
  misc_feature: DNAzyme
caggtcagggctagctacaacgacgacatgc

SEQ ID NO: 6107 - DNA, 31 bp, artificial sequence
  misc_feature: DNAzyme
cctccaggggctagctacaacgacagccgac

SEQ ID NO: 6108 - DNA, 31 bp, artificial sequence
  misc_feature: DNAzyme
ggtgacgaggctagctacaacgactccaggt

SEQ ID NO: 6109 - DNA, 31 bp, artificial sequence
  misc_feature: DNAzyme
gctggtgaggctagctacaacgagacctcca

SEQ ID NO: 6110 - DNA, 31 bp, artificial sequence
  misc_feature: DNAzyme
ggtgctggggctagctacaacgagacgacct

SEQ ID NO: 6111 - DNA, 31 bp, artificial sequence
  misc_feature: DNAzyme
cccaggtgggctagctacaacgatggtgacg

SEQ ID NO: 6112 - DNA, 31 bp, artificial sequence
  misc_feature: DNAzyme
cacccaggggctagctacaacgagctggtga

SEQ ID NO: 6113 - DNA, 31 bp, artificial sequence
  misc_feature: DNAzyme
tactagcaggctagctacaacgaccaggtgc

SEQ ID NO: 6114 - DNA, 31 bp, artificial sequence
  misc_feature: DNAzyme
cctactagggctagctacaacgaacccaggt

SEQ ID NO: 6115 - DNA, 31 bp, artificial sequence
  misc_feature: DNAzyme
gccacctaggctagctacaacgatagcaccc

SEQ ID NO: 6116 - DNA, 31 bp, artificial sequence
  misc_feature: DNAzyme
ggacgccaggctagctacaacgactactagc

SEQ ID NO: 6117 - DNA, 31 bp, artificial sequence
  misc_feature: DNAzyme
ccaggacgggctagctacaacgacacctact

SEQ ID NO: 6118 - DNA, 31 bp, artificial sequence
  misc_feature: DNAzyme
tgccaggaggctagctacaacgagccaccta

SEQ ID NO: 6119 - DNA, 31 bp, artificial sequence
  misc_feature: DNAzyme
cagagctgggctagctacaacgacaggacgc

SEQ ID NO: 6120 - DNA, 31 bp, artificial sequence
  misc_feature: DNAzyme
ggtcagagggctagctacaacgatgccagga

SEQ ID NO: 6121 - DNA, 31 bp, artificial sequence
  misc_feature: DNAzyme
atacgcggggctagctacaacgacagagctg

SEQ ID NO: 6122 - DNA, 31 bp, artificial sequence
  misc_feature: DNAzyme
gcaatacgggctagctacaacgaggtcagag

SEQ ID NO: 6123 - DNA, 31 bp, artificial sequence
  misc_feature: DNAzyme
aggcaataggctagctacaacgagcggtcag

SEQ ID NO: 6124 - DNA, 31 bp, artificial sequence
  misc_feature: DNAzyme
tcaggcaaggctagctacaacgaacgcggtc

SEQ ID NO: 6125 - DNA, 31 bp, artificial sequence
  misc_feature: DNAzyme
tcgtcaggggctagctacaacgaaatacgcg

SEQ ID NO: 6126 - DNA, 31 bp, artificial sequence
  misc_feature: DNAzyme
gcctgtcgggctagctacaacgacaggcaat

SEQ ID NO: 6127 - DNA, 31 bp, artificial sequence
  misc_feature: DNAzyme
gctgcctgggctagctacaacgacgtcaggc

SEQ ID NO: 6128 - DNA, 31 bp, artificial sequence
  misc_feature: DNAzyme
ccacgctgggctagctacaacgactgtcgtc

SEQ ID NO: 6129 - DNA, 31 bp, artificial sequence
  misc_feature: DNAzyme
tgaccacgggctagctacaacgatgcctgtc

SEQ ID NO: 6130 - DNA, 31 bp, artificial sequence
  misc_feature: DNAzyme
aatgaccaggctagctacaacgagctgcctg

SEQ ID NO: 6131 - DNA, 31 bp, artificial sequence
  misc_feature: DNAzyme
cacaatgaggctagctacaacgacacgctgc

SEQ ID NO: 6132 - DNA, 31 bp, artificial sequence
  misc_feature: DNAzyme
gcccacaaggctagctacaacgagaccacgc

SEQ ID NO: 6133 - DNA, 31 bp, artificial sequence
  misc_feature: DNAzyme
tctgcccaggctagctacaacgaaatgacca

SEQ ID NO: 6134 - DNA, 31 bp, artificial sequence
  misc_feature: DNAzyme
tgattctgggctagctacaacgaccacaatg

SEQ ID NO: 6135 - DNA, 31 bp, artificial sequence
  misc_feature: DNAzyme
caagatgaggctagctacaacgatctgccca

SEQ ID NO: 6136 - DNA, 31 bp, artificial sequence
  misc_feature: DNAzyme
ggacaagaggctagctacaacgagattctgc

SEQ ID NO: 6137 - DNA, 31 bp, artificial sequence
  misc_feature: DNAzyme
ttcccggaggctagctacaacgaaagatgat

SEQ ID NO: 6138 - DNA, 31 bp, artificial sequence
  misc_feature: DNAzyme
acagccggggctagctacaacgattcccgga

SEQ ID NO: 6139 - DNA, 31 bp, artificial sequence
  misc_feature: DNAzyme
gataacagggctagctacaacgacggcttcc

SEQ ID NO: 6140 - DNA, 31 bp, artificial sequence
  misc_feature: DNAzyme
ggggataaggctagctacaacgaagccggct

SEQ ID NO: 6141 - DNA, 31 bp, artificial sequence
  misc_feature: DNAzyme
gtcggggaggctagctacaacgaaacagccg

SEQ ID NO: 6142 - DNA, 31 bp, artificial sequence
  misc_feature: DNAzyme
cctccctgggctagctacaacgacggggata

SEQ ID NO: 6143 - DNA, 31 bp, artificial sequence
  misc_feature: DNAzyme
gtagagagggctagctacaacgactccctgt

SEQ ID NO: 6144 - DNA, 31 bp, artificial sequence
  misc_feature: DNAzyme
actcctggggctagctacaacgaagagagcc

SEQ ID NO: 6145 - DNA, 31 bp, artificial sequence
  misc_feature: DNAzyme
tcatcgaaggctagctacaacgatcctggta

SEQ ID NO: 6146 - DNA, 31 bp, artificial sequence
  misc_feature: DNAzyme
ccatctcaggctagctacaacgacgaactcc

SEQ ID NO: 6147 - DNA, 31 bp, artificial sequence
  misc_feature: DNAzyme
ctcctccaggctagctacaacgactcatcga

SEQ ID NO: 6148 - DNA, 31 bp, artificial sequence
  misc_feature: DNAzyme
gaggcacaggctagctacaacgatcctccat

SEQ ID NO: 6149 - DNA, 31 bp, artificial sequence
  misc_feature: DNAzyme
gtgaggcaggctagctacaacgaactcctcc

SEQ ID NO: 6150 - DNA, 31 bp, artificial sequence
  misc_feature: DNAzyme
gtgtgaggggctagctacaacgaacactcct

SEQ ID NO: 6151 - DNA, 31 bp, artificial sequence
  misc_feature: DNAzyme
gggaggtgggctagctacaacgagaggcaca

SEQ ID NO: 6152 - DNA, 31 bp, artificial sequence
  misc_feature: DNAzyme
aagggaggggctagctacaacgagtgaggca

SEQ ID NO: 6153 - DNA, 31 bp, artificial sequence
  misc_feature: DNAzyme
gttcgatgggctagctacaacgaaagggagg

SEQ ID NO: 6154 - DNA, 31 bp, artificial sequence
  misc_feature: DNAzyme
ctgttcgaggctagctacaacgagtaaggga

SEQ ID NO: 6155 - DNA, 31 bp, artificial sequence
  misc_feature: DNAzyme
atcccctgggctagctacaacgatcgatgta

SEQ ID NO: 6156 - DNA, 31 bp, artificial sequence
  misc_feature: DNAzyme
gagctgcaggctagctacaacgacccctgtt

SEQ ID NO: 6157 - DNA, 31 bp, artificial sequence
  misc_feature: DNAzyme
gcgagctgggctagctacaacgaatcccctg

SEQ ID NO: 6158 - DNA, 31 bp, artificial sequence
  misc_feature: DNAzyme
tcggcgagggctagctacaacgatgcatccc

SEQ ID NO: 6159 - DNA, 31 bp, artificial sequence
  misc_feature: DNAzyme
ctgctcggggctagctacaacgagagctgca

SEQ ID NO: 6160 - DNA, 31 bp, artificial sequence
  misc_feature: DNAzyme
ttgaactgggctagctacaacgatcggcgag

SEQ ID NO: 6161 - DNA, 31 bp, artificial sequence
  misc_feature: DNAzyme
tgcttgaaggctagctacaacgatgctcggc

SEQ ID NO: 6162 - DNA, 31 bp, artificial sequence
  misc_feature: DNAzyme
gccttctgggctagctacaacgattgaactg

SEQ ID NO: 6163 - DNA, 31 bp, artificial sequence
  misc_feature: DNAzyme
tccgagcgggctagctacaacgacttctgct

SEQ ID NO: 6164 - DNA, 31 bp, artificial sequence
  misc_feature: DNAzyme
aatccgagggctagctacaacgagccttctg

SEQ ID NO: 6165 - DNA, 31 bp, artificial sequence
  misc_feature: DNAzyme
tgcagcaaggctagctacaacgaccgagcgc

SEQ ID NO: 6166 - DNA, 31 bp, artificial sequence
  misc_feature: DNAzyme
gtttgcagggctagctacaacgaaatccgag

SEQ ID NO: 6167 - DNA, 31 bp, artificial sequence
  misc_feature: DNAzyme
gctgtttgggctagctacaacgaagcaatcc

SEQ ID NO: 6168 - DNA, 31 bp, artificial sequence
  misc_feature: DNAzyme
ggtggctgggctagctacaacgattgcagca

SEQ ID NO: 6169 - DNA, 31 bp, artificial sequence
  misc_feature: DNAzyme
gttggtggggctagctacaacgatgtttgca

SEQ ID NO: 6170 - DNA, 31 bp, artificial sequence
  misc_feature: DNAzyme
ttggttggggctagctacaacgaggctgttt

SEQ ID NO: 6171 - DNA, 31 bp, artificial sequence
  misc_feature: DNAzyme
ccgcttggggctagctacaacgatggtggct

SEQ ID NO: 6172 - DNA, 31 bp, artificial sequence
  misc_feature: DNAzyme
agcctccgggctagctacaacgattggttgg

SEQ ID NO: 6173 - DNA, 31 bp, artificial sequence
  misc_feature: DNAzyme
agcagcagggctagctacaacgactccgctt

SEQ ID NO: 6174 - DNA, 31 bp, artificial sequence
  misc_feature: DNAzyme
gggagcagggctagctacaacgaagcctccg

SEQ ID NO: 6175 - DNA, 31 bp, artificial sequence
  misc_feature: DNAzyme
cacgggagggctagctacaacgaagcagcct

SEQ ID NO: 6176 - DNA, 31 bp, artificial sequence
  misc_feature: DNAzyme
ttccaccaggctagctacaacgagggagcag

SEQ ID NO: 6177 - DNA, 31 bp, artificial sequence
  misc_feature: DNAzyme
ggattccaggctagctacaacgacacgggag

SEQ ID NO: 6178 - DNA, 31 bp, artificial sequence
  misc_feature: DNAzyme
cacttggaggctagctacaacgatccaccac

SEQ ID NO: 6179 - DNA, 31 bp, artificial sequence
  misc_feature: DNAzyme
gctcgccaggctagctacaacgattggattc

SEQ ID NO: 6180 - DNA, 31 bp, artificial sequence
  misc_feature: DNAzyme
agggctcgggctagctacaacgacacttgga

SEQ ID NO: 6181 - DNA, 31 bp, artificial sequence
  misc_feature: DNAzyme
ctcaagggggctagctacaacgatcgccact

SEQ ID NO: 6182 - DNA, 31 bp, artificial sequence
  misc_feature: DNAzyme
ccagaaagggctagctacaacgactcaaggg

SEQ ID NO: 6183 - DNA, 31 bp, artificial sequence
  misc_feature: DNAzyme
gtgcttcgggctagctacaacgaccagaaag

SEQ ID NO: 6184 - DNA, 31 bp, artificial sequence
  misc_feature: DNAzyme
cacatgtgggctagctacaacgattcgccca

SEQ ID NO: 6185 - DNA, 31 bp, artificial sequence
  misc_feature: DNAzyme
tccacatgggctagctacaacgagcttcgcc

SEQ ID NO: 6186 - DNA, 31 bp, artificial sequence
  misc_feature: DNAzyme
attccacaggctagctacaacgagtgcttcg

SEQ ID NO: 6187 - DNA, 31 bp, artificial sequence
  misc_feature: DNAzyme
aaattccaggctagctacaacgaatgtgctt

SEQ ID NO: 6188 - DNA, 31 bp, artificial sequence
  misc_feature: DNAzyme
tgatgaaaggctagctacaacgatccacatg

SEQ ID NO: 6189 - DNA, 31 bp, artificial sequence
  misc_feature: DNAzyme
cccgctgaggctagctacaacgagaaattcc

SEQ ID NO: 6190 - DNA, 31 bp, artificial sequence
  misc_feature: DNAzyme
gtatcccgggctagctacaacgatgatgaaa

SEQ ID NO: 6191 - DNA, 31 bp, artificial sequence
  misc_feature: DNAzyme
gtactgtaggctagctacaacgacccgctga

SEQ ID NO: 6192 - DNA, 31 bp, artificial sequence
  misc_feature: DNAzyme
aggtactgggctagctacaacgaatcccgct

SEQ ID NO: 6193 - DNA, 31 bp, artificial sequence
  misc_feature: DNAzyme
gctaggtaggctagctacaacgatgtatccc

SEQ ID NO: 6194 - DNA, 31 bp, artificial sequence
  misc_feature: DNAzyme
ctgctaggggctagctacaacgaactgtatc

SEQ ID NO: 6195 - DNA, 31 bp, artificial sequence
  misc_feature: DNAzyme
caagcctgggctagctacaacgataggtact

SEQ ID NO: 6196 - DNA, 31 bp, artificial sequence
  misc_feature: DNAzyme
tggacaagggctagctacaacgactgctagg

SEQ ID NO: 6197 - DNA, 31 bp, artificial sequence
  misc_feature: DNAzyme
agagtggaggctagctacaacgaaagcctgc

SEQ ID NO: 6198 - DNA, 31 bp, artificial sequence
  misc_feature: DNAzyme
aggcagagggctagctacaacgaggacaagc

SEQ ID NO: 6199 - DNA, 31 bp, artificial sequence
  misc_feature: DNAzyme
ttcccaggggctagctacaacgaagagtgga

SEQ ID NO: 6200 - DNA, 31 bp, artificial sequence
  misc_feature: DNAzyme
tcgcggggggctagctacaacgatcccaggc

SEQ ID NO: 6201 - DNA, 31 bp, artificial sequence
  misc_feature: DNAzyme
tgctatcgggctagctacaacgaggggttcc

SEQ ID NO: 6202 - DNA, 31 bp, artificial sequence
  misc_feature: DNAzyme
tgatgctaggctagctacaacgacgcggggt

SEQ ID NO: 6203 - DNA, 31 bp, artificial sequence
  misc_feature: DNAzyme
caatgatgggctagctacaacgatatcgcgg

SEQ ID NO: 6204 - DNA, 31 bp, artificial sequence
  misc_feature: DNAzyme
atcaatgaggctagctacaacgagctatcgc

SEQ ID NO: 6205 - DNA, 31 bp, artificial sequence
  misc_feature: DNAzyme
gccatcaaggctagctacaacgagatgctat

SEQ ID NO: 6206 - DNA, 31 bp, artificial sequence
  misc_feature: DNAzyme
gaatgccaggctagctacaacgacaatgatg

SEQ ID NO: 6207 - DNA, 31 bp, artificial sequence
  misc_feature: DNAzyme
tgtgaatgggctagctacaacgacatcaatg

SEQ ID NO: 6208 - DNA, 31 bp, artificial sequence
  misc_feature: DNAzyme
gctgtgaaggctagctacaacgagccatcaa

SEQ ID NO: 6209 - DNA, 31 bp, artificial sequence
  misc_feature: DNAzyme
ggaggctgggctagctacaacgagaatgcca

SEQ ID NO: 6210 - DNA, 31 bp, artificial sequence
  misc_feature: DNAzyme
gatggaggggctagctacaacgatgtgaatg

SEQ ID NO: 6211 - DNA, 31 bp, artificial sequence
  misc_feature: DNAzyme
gctggtgaggctagctacaacgaggaggctg

SEQ ID NO: 6212 - DNA, 31 bp, artificial sequence
  misc_feature: DNAzyme
cgggctggggctagctacaacgagatggagg

SEQ ID NO: 6213 - DNA, 31 bp, artificial sequence
  misc_feature: DNAzyme
tgagcgggggctagctacaacgatggtgatg

SEQ ID NO: 6214 - DNA, 31 bp, artificial sequence
  misc_feature: DNAzyme
gtggtgagggctagctacaacgagggctggt

SEQ ID NO: 6215 - DNA, 31 bp, artificial sequence
  misc_feature: DNAzyme
ttgggtggggctagctacaacgagagcgggc

SEQ ID NO: 6216 - DNA, 31 bp, artificial sequence
  misc_feature: DNAzyme
gctttgggggctagctacaacgaggtgagcg

SEQ ID NO: 6217 - DNA, 31 bp, artificial sequence
  misc_feature: DNAzyme
ggagggtgggctagctacaacgatttgggtg

SEQ ID NO: 6218 - DNA, 31 bp, artificial sequence
  misc_feature: DNAzyme
caggagggggctagctacaacgagctttggg

SEQ ID NO: 6219 - DNA, 31 bp, artificial sequence
  misc_feature: DNAzyme
atgttgaaggctagctacaacgaaggagggt

SEQ ID NO: 6220 - DNA, 31 bp, artificial sequence
  misc_feature: DNAzyme
ccaagatgggctagctacaacgatgaacagg

SEQ ID NO: 6221 - DNA, 31 bp, artificial sequence
  misc_feature: DNAzyme
tcccaagaggctagctacaacgagttgaaca

SEQ ID NO: 6222 - DNA, 31 bp, artificial sequence
  misc_feature: DNAzyme
gccacccaggctagctacaacgacctcccaa

SEQ ID NO: 6223 - DNA, 31 bp, artificial sequence
  misc_feature: DNAzyme
ggcggccaggctagctacaacgaccaccctc

SEQ ID NO: 6224 - DNA, 31 bp, artificial sequence
  misc_feature: DNAzyme
ttgggcggggctagctacaacgacacccacc

SEQ ID NO: 6225 - DNA, 31 bp, artificial sequence
  misc_feature: DNAzyme
gagttgggggctagctacaacgaggccaccc

SEQ ID NO: 6226 - DNA, 31 bp, artificial sequence
  misc_feature: DNAzyme
ggagcgagggctagctacaacgatgggcggc

SEQ ID NO: 6227 - DNA, 31 bp, artificial sequence
  misc_feature: DNAzyme
ggggggagggctagctacaacgagagttggg

SEQ ID NO: 6228 - DNA, 31 bp, artificial sequence
  misc_feature: DNAzyme
cgaaacggggctagctacaacgatctggggg

SEQ ID NO: 6229 - DNA, 31 bp, artificial sequence
  misc_feature: DNAzyme
ggccgaaaggctagctacaacgaggctctgg

SEQ ID NO: 6230 - DNA, 31 bp, artificial sequence
  misc_feature: DNAzyme
cacgaaggggctagctacaacgacgaaacgg

SEQ ID NO: 6231 - DNA, 31 bp, artificial sequence
  misc_feature: DNAzyme
ggcgcccaggctagctacaacgagaaggccg

SEQ ID NO: 6232 - DNA, 31 bp, artificial sequence
  misc_feature: DNAzyme
tgccggcgggctagctacaacgaccacgaag

SEQ ID NO: 6233 - DNA, 31 bp, artificial sequence
  misc_feature: DNAzyme
gatgccggggctagctacaacgagcccacga

SEQ ID NO: 6234 - DNA, 31 bp, artificial sequence
  misc_feature: DNAzyme
cagcgatgggctagctacaacgacggcgccc

SEQ ID NO: 6235 - DNA, 31 bp, artificial sequence
  misc_feature: DNAzyme
gccagcgaggctagctacaacgagccggcgc

SEQ ID NO: 6236 - DNA, 31 bp, artificial sequence
  misc_feature: DNAzyme
cgcgccagggctagctacaacgagatgccgg

SEQ ID NO: 6237 - DNA, 31 bp, artificial sequence
  misc_feature: DNAzyme
cagccgcgggctagctacaacgacagcgatg

SEQ ID NO: 6238 - DNA, 31 bp, artificial sequence
  misc_feature: DNAzyme
aacagccgggctagctacaacgagccagcga

SEQ ID NO: 6239 - DNA, 31 bp, artificial sequence
  misc_feature: DNAzyme
gccaacagggctagctacaacgacgcgccag

SEQ ID NO: 6240 - DNA, 31 bp, artificial sequence
  misc_feature: DNAzyme
gctgccaaggctagctacaacgaagccgcgc

SEQ ID NO: 6241 - DNA, 31 bp, artificial sequence
  misc_feature: DNAzyme
ctatgctgggctagctacaacgacaacagcc

SEQ ID NO: 6242 - DNA, 31 bp, artificial sequence
  misc_feature: DNAzyme
ggcctatgggctagctacaacgatgccaaca

SEQ ID NO: 6243 - DNA, 31 bp, artificial sequence
  misc_feature: DNAzyme
aaggcctaggctagctacaacgagctgccaa

SEQ ID NO: 6244 - DNA, 31 bp, artificial sequence
  misc_feature: DNAzyme
tcccaaggggctagctacaacgactatgctg

SEQ ID NO: 6245 - DNA, 31 bp, artificial sequence
  misc_feature: DNAzyme
tacaagcaggctagctacaacgacttcccaa

SEQ ID NO: 6246 - DNA, 31 bp, artificial sequence
  misc_feature: DNAzyme
tctacaagggctagctacaacgaaccttccc

SEQ ID NO: 6247 - DNA, 31 bp, artificial sequence
  misc_feature: DNAzyme
aatgtctaggctagctacaacgaaagcacct

SEQ ID NO: 6248 - DNA, 31 bp, artificial sequence
  misc_feature: DNAzyme
ccagaatgggctagctacaacgactacaagc

SEQ ID NO: 6249 - DNA, 31 bp, artificial sequence
  misc_feature: DNAzyme
cgccagaaggctagctacaacgagtctacaa

SEQ ID NO: 6250 - DNA, 31 bp, artificial sequence
  misc_feature: DNAzyme
atagcccgggctagctacaacgacagaatgt

SEQ ID NO: 6251 - DNA, 31 bp, artificial sequence
  misc_feature: DNAzyme
ctccatagggctagctacaacgaccgccaga

SEQ ID NO: 6252 - DNA, 31 bp, artificial sequence
  misc_feature: DNAzyme
ctgctccaggctagctacaacgaagcccgcc

SEQ ID NO: 6253 - DNA, 31 bp, artificial sequence
  misc_feature: DNAzyme
cactcctgggctagctacaacgatccatagc

SEQ ID NO: 6254 - DNA, 31 bp, artificial sequence
  misc_feature: DNAzyme
acccgccaggctagctacaacgatcctgctc

SEQ ID NO: 6255 - DNA, 31 bp, artificial sequence
  misc_feature: DNAzyme
agcacccgggctagctacaacgacactcctg

SEQ ID NO: 6256 - DNA, 31 bp, artificial sequence
  misc_feature: DNAzyme
cgagagcaggctagctacaacgaccgccact

SEQ ID NO: 6257 - DNA, 31 bp, artificial sequence
  misc_feature: DNAzyme
cacgagagggctagctacaacgaacccgcca

SEQ ID NO: 6258 - DNA, 31 bp, artificial sequence
  misc_feature: DNAzyme
gaaggccaggctagctacaacgagagagcac

SEQ ID NO: 6259 - DNA, 31 bp, artificial sequence
  misc_feature: DNAzyme
cttgaaggggctagctacaacgacacgagag

SEQ ID NO: 6260 - DNA, 31 bp, artificial sequence
  misc_feature: DNAzyme
gctcatgaggctagctacaacgacttgaagg

SEQ ID NO: 6261 - DNA, 31 bp, artificial sequence
  misc_feature: DNAzyme
cccgctcaggctagctacaacgagaccttga

SEQ ID NO: 6262 - DNA, 31 bp, artificial sequence
  misc_feature: DNAzyme
tctccccgggctagctacaacgatcatgacc

SEQ ID NO: 6263 - DNA, 31 bp, artificial sequence
  misc_feature: DNAzyme
agaaggcaggctagctacaacgactccccgc

SEQ ID NO: 6264 - DNA, 31 bp, artificial sequence
  misc_feature: DNAzyme
gtagaaggggctagctacaacgaatctcccc

SEQ ID NO: 6265 - DNA, 31 bp, artificial sequence
  misc_feature: DNAzyme
gtcctcggggctagctacaacgaagaaggca

SEQ ID NO: 6266 - DNA, 31 bp, artificial sequence
  misc_feature: DNAzyme
tgaccaggggctagctacaacgacctcggta

SEQ ID NO: 6267 - DNA, 31 bp, artificial sequence
  misc_feature: DNAzyme
taagttgaggctagctacaacgacaggtcct

SEQ ID NO: 6268 - DNA, 31 bp, artificial sequence
  misc_feature: DNAzyme
ggagtaagggctagctacaacgatgaccagg

SEQ ID NO: 6269 - DNA, 31 bp, artificial sequence
  misc_feature: DNAzyme
gcagggagggctagctacaacgaaagttgac

SEQ ID NO: 6270 - DNA, 31 bp, artificial sequence
  misc_feature: DNAzyme
gaggatggggctagctacaacgaagggagta

SEQ ID NO: 6271 - DNA, 31 bp, artificial sequence
  misc_feature: DNAzyme
agagaggaggctagctacaacgaggcaggga

SEQ ID NO: 6272 - DNA, 31 bp, artificial sequence
  misc_feature: DNAzyme
ccagggcgggctagctacaacgacaggagag

SEQ ID NO: 6273 - DNA, 31 bp, artificial sequence
  misc_feature: DNAzyme
gaccagggggctagctacaacgagccaggag

SEQ ID NO: 6274 - DNA, 31 bp, artificial sequence
  misc_feature: DNAzyme
cccgacgaggctagctacaacgacagggcgc

SEQ ID NO: 6275 - DNA, 31 bp, artificial sequence
  misc_feature: DNAzyme
caccccgaggctagctacaacgagaccaggg

SEQ ID NO: 6276 - DNA, 31 bp, artificial sequence
  misc_feature: DNAzyme
gcacaccaggctagctacaacgacccgacga

SEQ ID NO: 6277 - DNA, 31 bp, artificial sequence
  misc_feature: DNAzyme
tgcgcacaggctagctacaacgacaccccga

SEQ ID NO: 6278 - DNA, 31 bp, artificial sequence
  misc_feature: DNAzyme
gctgcgcaggctagctacaacgaaccacccc

SEQ ID NO: 6279 - DNA, 31 bp, artificial sequence
  misc_feature: DNAzyme
tcgctgcgggctagctacaacgaacaccacc

SEQ ID NO: 6280 - DNA, 31 bp, artificial sequence
  misc_feature: DNAzyme
tatcgctgggctagctacaacgagcacacca

SEQ ID NO: 6281 - DNA, 31 bp, artificial sequence
  misc_feature: DNAzyme
cagtatcgggctagctacaacgatgcgcaca

SEQ ID NO: 6282 - DNA, 31 bp, artificial sequence
  misc_feature: DNAzyme
acgcagtaggctagctacaacgacgctgcgc

SEQ ID NO: 6283 - DNA, 31 bp, artificial sequence
  misc_feature: DNAzyme
cgacgcagggctagctacaacgaatcgctgc

SEQ ID NO: 6284 - DNA, 31 bp, artificial sequence
  misc_feature: DNAzyme
tgccgacgggctagctacaacgaagtatcgc

SEQ ID NO: 6285 - DNA, 31 bp, artificial sequence
  misc_feature: DNAzyme
catgccgaggctagctacaacgagcagtatc

SEQ ID NO: 6286 - DNA, 31 bp, artificial sequence
  misc_feature: DNAzyme
cccacatgggctagctacaacgacgacgcag

SEQ ID NO: 6287 - DNA, 31 bp, artificial sequence
  misc_feature: DNAzyme
ggcccacaggctagctacaacgagccgacgc

SEQ ID NO: 6288 - DNA, 31 bp, artificial sequence
  misc_feature: DNAzyme
tgggcccaggctagctacaacgaatgccgac

SEQ ID NO: 6289 - DNA, 31 bp, artificial sequence
  misc_feature: DNAzyme
ctcctgggggctagctacaacgaccacatgc

SEQ ID NO: 6290 - DNA, 31 bp, artificial sequence
  misc_feature: DNAzyme
gcacagcgggctagctacaacgacctctcct

SEQ ID NO: 6291 - DNA, 31 bp, artificial sequence
  misc_feature: DNAzyme
ctgcacagggctagctacaacgagccctctc

SEQ ID NO: 6292 - DNA, 31 bp, artificial sequence
  misc_feature: DNAzyme
ccactgcaggctagctacaacgaagcgccct

SEQ ID NO: 6293 - DNA, 31 bp, artificial sequence
  misc_feature: DNAzyme
atccactgggctagctacaacgaacagcgcc

SEQ ID NO: 6294 - DNA, 31 bp, artificial sequence
  misc_feature: DNAzyme
ttcatccaggctagctacaacgatgcacagc

SEQ ID NO: 6295 - DNA, 31 bp, artificial sequence
  misc_feature: DNAzyme
ccgattcaggctagctacaacgaccactgca

SEQ ID NO: 6296 - DNA, 31 bp, artificial sequence
  misc_feature: DNAzyme
tcagccgaggctagctacaacgatcatccac

SEQ ID NO: 6297 - DNA, 31 bp, artificial sequence
  misc_feature: DNAzyme
gctatcagggctagctacaacgacgattcat

SEQ ID NO: 6298 - DNA, 31 bp, artificial sequence
  misc_feature: DNAzyme
gaacgctaggctagctacaacgacagccgat

SEQ ID NO: 6299 - DNA, 31 bp, artificial sequence
  misc_feature: DNAzyme
agcgaacgggctagctacaacgatatcagcc

SEQ ID NO: 6300 - DNA, 31 bp, artificial sequence
  misc_feature: DNAzyme
gaagcgaaggctagctacaacgagctatcag

SEQ ID NO: 6301 - DNA, 31 bp, artificial sequence
  misc_feature: DNAzyme
ccgcgaagggctagctacaacgagaacgcta

SEQ ID NO: 6302 - DNA, 31 bp, artificial sequence
  misc_feature: DNAzyme
ttgccccgggctagctacaacgagaagcgaa

SEQ ID NO: 6303 - DNA, 31 bp, artificial sequence
  misc_feature: DNAzyme
catggttgggctagctacaacgacccgcgaa

SEQ ID NO: 6304 - DNA, 31 bp, artificial sequence
  misc_feature: DNAzyme
agacatggggctagctacaacgatgccccgc

SEQ ID NO: 6305 - DNA, 31 bp, artificial sequence
  misc_feature: DNAzyme
gggagacaggctagctacaacgaggttgccc

SEQ ID NO: 6306 - DNA, 31 bp, artificial sequence
  misc_feature: DNAzyme
gggggagaggctagctacaacgaatggttgc

SEQ ID NO: 6307 - DNA, 31 bp, artificial sequence
  misc_feature: DNAzyme
atagtgcgggctagctacaacgagggggaga

SEQ ID NO: 6308 - DNA, 31 bp, artificial sequence
  misc_feature: DNAzyme
acatagtgggctagctacaacgagtggggga

SEQ ID NO: 6309 - DNA, 31 bp, artificial sequence
  misc_feature: DNAzyme
gcacatagggctagctacaacgagcgtgggg

SEQ ID NO: 6310 - DNA, 31 bp, artificial sequence
  misc_feature: DNAzyme
caggcacaggctagctacaacgaagtgcgtg

SEQ ID NO: 6311 - DNA, 31 bp, artificial sequence
  misc_feature: DNAzyme
ctcaggcaggctagctacaacgaatagtgcg

SEQ ID NO: 6312 - DNA, 31 bp, artificial sequence
  misc_feature: DNAzyme
ctctcaggggctagctacaacgaacatagtg

SEQ ID NO: 6313 - DNA, 31 bp, artificial sequence
  misc_feature: DNAzyme
ctgcgtcgggctagctacaacgatctcaggc

SEQ ID NO: 6314 - DNA, 31 bp, artificial sequence
  misc_feature: DNAzyme
ccgctgcgggctagctacaacgacgctctca

SEQ ID NO: 6315 - DNA, 31 bp, artificial sequence
  misc_feature: DNAzyme
cgccgctgggctagctacaacgagtcgctct

SEQ ID NO: 6316 - DNA, 31 bp, artificial sequence
  misc_feature: DNAzyme
gcgcgccgggctagctacaacgatgcgtcgc

SEQ ID NO: 6317 - DNA, 31 bp, artificial sequence
  misc_feature: DNAzyme
gacgcgcgggctagctacaacgacgctgcgt

SEQ ID NO: 6318 - DNA, 31 bp, artificial sequence
  misc_feature: DNAzyme
gtgacgcgggctagctacaacgagccgctgc

SEQ ID NO: 6319 - DNA, 31 bp, artificial sequence
  misc_feature: DNAzyme
gtgtgacgggctagctacaacgagcgccgct

SEQ ID NO: 6320 - DNA, 31 bp, artificial sequence
  misc_feature: DNAzyme
ttgtgtgaggctagctacaacgagcgcgccg

SEQ ID NO: 6321 - DNA, 31 bp, artificial sequence
  misc_feature: DNAzyme
gatttgtgggctagctacaacgagacgcgcg

SEQ ID NO: 6322 - DNA, 31 bp, artificial sequence
  misc_feature: DNAzyme
aggatttgggctagctacaacgagtgacgcg

SEQ ID NO: 6323 - DNA, 31 bp, artificial sequence
  misc_feature: DNAzyme
ggagaggaggctagctacaacgattgtgtga

SEQ ID NO: 6324 - DNA, 31 bp, artificial sequence
  misc_feature: DNAzyme
tggtgaggggctagctacaacgatggagagg

SEQ ID NO: 6325 - DNA, 31 bp, artificial sequence
  misc_feature: DNAzyme
agtgatggggctagctacaacgagaggctgg

SEQ ID NO: 6326 - DNA, 31 bp, artificial sequence
  misc_feature: DNAzyme
ctgagtgaggctagctacaacgaggtgaggc

SEQ ID NO: 6327 - DNA, 31 bp, artificial sequence
  misc_feature: DNAzyme
cagctgagggctagctacaacgagatggtga

SEQ ID NO: 6328 - DNA, 31 bp, artificial sequence
  misc_feature: DNAzyme
ctcagcagggctagctacaacgatgagtgat

SEQ ID NO: 6329 - DNA, 31 bp, artificial sequence
  misc_feature: DNAzyme
ctcctcagggctagctacaacgaagctgagt

SEQ ID NO: 6330 - DNA, 31 bp, artificial sequence
  misc_feature: DNAzyme
tgatggagggctagctacaacgactcctcag

SEQ ID NO: 6331 - DNA, 31 bp, artificial sequence
  misc_feature: DNAzyme
tccactgaggctagctacaacgaggagcctc

SEQ ID NO: 6332 - DNA, 31 bp, artificial sequence
  misc_feature: DNAzyme
ttgatccaggctagctacaacgatgatggag

SEQ ID NO: 6333 - DNA, 31 bp, artificial sequence
  misc_feature: DNAzyme
ctcattgaggctagctacaacgaccactgat

SEQ ID NO: 6334 - DNA, 31 bp, artificial sequence
  misc_feature: DNAzyme
agtcctcaggctagctacaacgatgatccac

SEQ ID NO: 6335 - DNA, 31 bp, artificial sequence
  misc_feature: DNAzyme
tggagcagggctagctacaacgacctcattg

SEQ ID NO: 6336 - DNA, 31 bp, artificial sequence
  misc_feature: DNAzyme
gcgtggagggctagctacaacgaagtcctca

SEQ ID NO: 6337 - DNA, 31 bp, artificial sequence
  misc_feature: DNAzyme
acatggcgggctagctacaacgaggagcagt

SEQ ID NO: 6338 - DNA, 31 bp, artificial sequence
  misc_feature: DNAzyme
gaacatggggctagctacaacgagtggagca

SEQ ID NO: 6339 - DNA, 31 bp, artificial sequence
  misc_feature: DNAzyme
ccggaacaggctagctacaacgaggcgtgga

SEQ ID NO: 6340 - DNA, 31 bp, artificial sequence
  misc_feature: DNAzyme
agccggaaggctagctacaacgaatggcgtg

SEQ ID NO: 6341 - DNA, 31 bp, artificial sequence
  misc_feature: DNAzyme
gccacgagggctagctacaacgacggaacat

SEQ ID NO: 6342 - DNA, 31 bp, artificial sequence
  misc_feature: DNAzyme
cttagccaggctagctacaacgagagccgga

SEQ ID NO: 6343 - DNA, 31 bp, artificial sequence
  misc_feature: DNAzyme
tcccttagggctagctacaacgacacgagcc

SEQ ID NO: 6344 - DNA, 31 bp, artificial sequence
  misc_feature: DNAzyme
cccaaacaggctagctacaacgacccttagc

SEQ ID NO: 6345 - DNA, 31 bp, artificial sequence
  misc_feature: DNAzyme
gtcccaaaggctagctacaacgaatccctta

SEQ ID NO: 6346 - DNA, 31 bp, artificial sequence
  misc_feature: DNAzyme
atatccagggctagctacaacgacccaaaca

SEQ ID NO: 6347 - DNA, 31 bp, artificial sequence
  misc_feature: DNAzyme
cgtgcataggctagctacaacgaccagtccc

SEQ ID NO: 6348 - DNA, 31 bp, artificial sequence
  misc_feature: DNAzyme
accgtgcaggctagctacaacgaatccagtc

SEQ ID NO: 6349 - DNA, 31 bp, artificial sequence
  misc_feature: DNAzyme
acaccgtgggctagctacaacgaatatccag

SEQ ID NO: 6350 - DNA, 31 bp, artificial sequence
  misc_feature: DNAzyme
caacaccgggctagctacaacgagcatatcc

SEQ ID NO: 6351 - DNA, 31 bp, artificial sequence
  misc_feature: DNAzyme
agtcaacaggctagctacaacgacgtgcata

SEQ ID NO: 6352 - DNA, 31 bp, artificial sequence
  misc_feature: DNAzyme
tcagtcaaggctagctacaacgaaccgtgca

SEQ ID NO: 6353 - DNA, 31 bp, artificial sequence
  misc_feature: DNAzyme
gaagtcagggctagctacaacgacaacaccg

SEQ ID NO: 6354 - DNA, 31 bp, artificial sequence
  misc_feature: DNAzyme
tcttgaagggctagctacaacgacagtcaac

SEQ ID NO: 6355 - DNA, 31 bp, artificial sequence
  misc_feature: DNAzyme
aagccaggggctagctacaacgacttgaagt

SEQ ID NO: 6356 - DNA, 31 bp, artificial sequence
  misc_feature: DNAzyme
gactgaagggctagctacaacgacaggtctt

SEQ ID NO: 6357 - DNA, 31 bp, artificial sequence
  misc_feature: DNAzyme
agcttggaggctagctacaacgatgaagcca

SEQ ID NO: 6358 - DNA, 31 bp, artificial sequence
  misc_feature: DNAzyme
ggcaggagggctagctacaacgattggactg

SEQ ID NO: 6359 - DNA, 31 bp, artificial sequence
  misc_feature: DNAzyme
aaccgcggggctagctacaacgaaggagctt

SEQ ID NO: 6360 - DNA, 31 bp, artificial sequence
  misc_feature: DNAzyme
ggcaaccgggctagctacaacgaggcaggag

SEQ ID NO: 6361 - DNA, 31 bp, artificial sequence
  misc_feature: DNAzyme
cccggcaaggctagctacaacgacgcggcag

SEQ ID NO: 6362 - DNA, 31 bp, artificial sequence
  misc_feature: DNAzyme
actcccggggctagctacaacgaaaccgcgg

SEQ ID NO: 6363 - DNA, 31 bp, artificial sequence
  misc_feature: DNAzyme
gaaagggaggctagctacaacgatcccggca

SEQ ID NO: 6364 - DNA, 31 bp, artificial sequence
  misc_feature: DNAzyme
cgttggcaggctagctacaacgagagaagaa

SEQ ID NO: 6365 - DNA, 31 bp, artificial sequence
  misc_feature: DNAzyme
cacgttggggctagctacaacgaatgagaag

SEQ ID NO: 6366 - DNA, 31 bp, artificial sequence
  misc_feature: DNAzyme
tacccacgggctagctacaacgatggcatga

SEQ ID NO: 6367 - DNA, 31 bp, artificial sequence
  misc_feature: DNAzyme
tgtacccaggctagctacaacgagttggcat

SEQ ID NO: 6368 - DNA, 31 bp, artificial sequence
  misc_feature: DNAzyme
cccctgtaggctagctacaacgaccacgttg

SEQ ID NO: 6369 - DNA, 31 bp, artificial sequence
  misc_feature: DNAzyme
cccccctgggctagctacaacgaacccacgt

SEQ ID NO: 6370 - DNA, 31 bp, artificial sequence
  misc_feature: DNAzyme
ccgccagaggctagctacaacgaccccctgt

SEQ ID NO: 6371 - DNA, 31 bp, artificial sequence
  misc_feature: DNAzyme
tctccccgggctagctacaacgacagacccc

SEQ ID NO: 6372 - DNA, 31 bp, artificial sequence
  misc_feature: DNAzyme
tgataccgggctagctacaacgactccccgc

SEQ ID NO: 6373 - DNA, 31 bp, artificial sequence
  misc_feature: DNAzyme
gcatgataggctagctacaacgacgtctccc

SEQ ID NO: 6374 - DNA, 31 bp, artificial sequence
  misc_feature: DNAzyme
ttgcatgaggctagctacaacgaaccgtctc

SEQ ID NO: 6375 - DNA, 31 bp, artificial sequence
  misc_feature: DNAzyme
ggtttgcaggctagctacaacgagataccgt

SEQ ID NO: 6376 - DNA, 31 bp, artificial sequence
  misc_feature: DNAzyme
gtggtttgggctagctacaacgaatgatacc

SEQ ID NO: 6377 - DNA, 31 bp, artificial sequence
  misc_feature: DNAzyme
gcaggtggggctagctacaacgattgcatga

SEQ ID NO: 6378 - DNA, 31 bp, artificial sequence
  misc_feature: DNAzyme
tgggcaggggctagctacaacgaggtttgca

SEQ ID NO: 6379 - DNA, 31 bp, artificial sequence
  misc_feature: DNAzyme
cgcatgggggctagctacaacgaaggtggtt

SEQ ID NO: 6380 - DNA, 31 bp, artificial sequence
  misc_feature: DNAzyme
gctccgcaggctagctacaacgagggcaggt

SEQ ID NO: 6381 - DNA, 31 bp, artificial sequence
  misc_feature: DNAzyme
gcgctccgggctagctacaacgaatgggcag

SEQ ID NO: 6382 - DNA, 31 bp, artificial sequence
  misc_feature: DNAzyme
gatctgcgggctagctacaacgatccgcatg

SEQ ID NO: 6383 - DNA, 31 bp, artificial sequence
  misc_feature: DNAzyme
gtgatctgggctagctacaacgagctccgca

SEQ ID NO: 6384 - DNA, 31 bp, artificial sequence
  misc_feature: DNAzyme
tccagtgaggctagctacaacgactgcgctc

SEQ ID NO: 6385 - DNA, 31 bp, artificial sequence
  misc_feature: DNAzyme
atgtccagggctagctacaacgagatctgcg

SEQ ID NO: 6386 - DNA, 31 bp, artificial sequence
  misc_feature: DNAzyme
ttgacatgggctagctacaacgaccagtgat

SEQ ID NO: 6387 - DNA, 31 bp, artificial sequence
  misc_feature: DNAzyme
tcttgacaggctagctacaacgagtccagtg

SEQ ID NO: 6388 - DNA, 31 bp, artificial sequence
  misc_feature: DNAzyme
gttcttgaggctagctacaacgaatgtccag

SEQ ID NO: 6389 - DNA, 31 bp, artificial sequence
  misc_feature: DNAzyme
tggaaccgggctagctacaacgatcttgaca

SEQ ID NO: 6390 - DNA, 31 bp, artificial sequence
  misc_feature: DNAzyme
tcatggaaggctagctacaacgacgttcttg

SEQ ID NO: 6391 - DNA, 31 bp, artificial sequence
  misc_feature: DNAzyme
gatcctcaggctagctacaacgaggaaccgt

SEQ ID NO: 6392 - DNA, 31 bp, artificial sequence
  misc_feature: DNAzyme
cccgacgaggctagctacaacgacctcatgg

SEQ ID NO: 6393 - DNA, 31 bp, artificial sequence
  misc_feature: DNAzyme
aggcccgaggctagctacaacgagatcctca

SEQ ID NO: 6394 - DNA, 31 bp, artificial sequence
  misc_feature: DNAzyme
gtcttaggggctagctacaacgaccgacgat

SEQ ID NO: 6395 - DNA, 31 bp, artificial sequence
  misc_feature: DNAzyme
gctacaggggctagctacaacgacttaggcc

SEQ ID NO: 6396 - DNA, 31 bp, artificial sequence
  misc_feature: DNAzyme
tgttgctaggctagctacaacgaaggtctta

SEQ ID NO: 6397 - DNA, 31 bp, artificial sequence
  misc_feature: DNAzyme
acgtgttgggctagctacaacgatacaggtc

SEQ ID NO: 6398 - DNA, 31 bp, artificial sequence
  misc_feature: DNAzyme
gccacgtgggctagctacaacgatgctacag

SEQ ID NO: 6399 - DNA, 31 bp, artificial sequence
  misc_feature: DNAzyme
atgccacgggctagctacaacgagttgctac

SEQ ID NO: 6400 - DNA, 31 bp, artificial sequence
  misc_feature: DNAzyme
ccatgccaggctagctacaacgagtgttgct

SEQ ID NO: 6401 - DNA, 31 bp, artificial sequence
  misc_feature: DNAzyme
gttccatgggctagctacaacgacacgtgtt

SEQ ID NO: 6402 - DNA, 31 bp, artificial sequence
  misc_feature: DNAzyme
atgttccaggctagctacaacgagccacgtg

SEQ ID NO: 6403 - DNA, 31 bp, artificial sequence
  misc_feature: DNAzyme
ggggaatgggctagctacaacgatccatgcc

SEQ ID NO: 6404 - DNA, 31 bp, artificial sequence
  misc_feature: DNAzyme
atggggaaggctagctacaacgagttccatg

SEQ ID NO: 6405 - DNA, 31 bp, artificial sequence
  misc_feature: DNAzyme
tgcgttgaggctagctacaacgaggggaatg

SEQ ID NO: 6406 - DNA, 31 bp, artificial sequence
  misc_feature: DNAzyme
tgtatgcgggctagctacaacgatgatgggg

SEQ ID NO: 6407 - DNA, 31 bp, artificial sequence
  misc_feature: DNAzyme
ggtgtatgggctagctacaacgagttgatgg

SEQ ID NO: 6408 - DNA, 31 bp, artificial sequence
  misc_feature: DNAzyme
gtggtgtaggctagctacaacgagcgttgat

SEQ ID NO: 6409 - DNA, 31 bp, artificial sequence
  misc_feature: DNAzyme
ccgtggtgggctagctacaacgaatgcgttg

SEQ ID NO: 6410 - DNA, 31 bp, artificial sequence
  misc_feature: DNAzyme
gcccgtggggctagctacaacgagtatgcgt

SEQ ID NO: 6411 - DNA, 31 bp, artificial sequence
  misc_feature: DNAzyme
ggggcccgggctagctacaacgaggtgtatg

SEQ ID NO: 6412 - DNA, 31 bp, artificial sequence
  misc_feature: DNAzyme
tgcaggggggctagctacaacgaccgtggtg

SEQ ID NO: 6413 - DNA, 31 bp, artificial sequence
  misc_feature: DNAzyme
agggtgtgggctagctacaacgaaggggccc

SEQ ID NO: 6414 - DNA, 31 bp, artificial sequence
  misc_feature: DNAzyme
ggagggtgggctagctacaacgagcaggggc

SEQ ID NO: 6415 - DNA, 31 bp, artificial sequence
  misc_feature: DNAzyme
ggggagggggctagctacaacgagtgcaggg

SEQ ID NO: 6416 - DNA, 31 bp, artificial sequence
  misc_feature: DNAzyme
gtttggcgggctagctacaacgacggggagg

SEQ ID NO: 6417 - DNA, 31 bp, artificial sequence
  misc_feature: DNAzyme
tagtttggggctagctacaacgagccgggga

SEQ ID NO: 6418 - DNA, 31 bp, artificial sequence
  misc_feature: DNAzyme
tagaatagggctagctacaacgattggcgcc

SEQ ID NO: 6419 - DNA, 31 bp, artificial sequence
  misc_feature: DNAzyme
ccctagaaggctagctacaacgaagtttggc

SEQ ID NO: 6420 - DNA, 31 bp, artificial sequence
  misc_feature: DNAzyme
ccatagcgggctagctacaacgacctagaat

SEQ ID NO: 6421 - DNA, 31 bp, artificial sequence
  misc_feature: DNAzyme
cgccatagggctagctacaacgagccctaga

SEQ ID NO: 6422 - DNA, 31 bp, artificial sequence
  misc_feature: DNAzyme
acccgccaggctagctacaacgaagcgccct

SEQ ID NO: 6423 - DNA, 31 bp, artificial sequence
  misc_feature: DNAzyme
gccacccgggctagctacaacgacatagcgc

SEQ ID NO: 6424 - DNA, 31 bp, artificial sequence
  misc_feature: DNAzyme
agcggccaggctagctacaacgaccgccata

SEQ ID NO: 6425 - DNA, 31 bp, artificial sequence
  misc_feature: DNAzyme
ctcagcggggctagctacaacgacacccgcc

SEQ ID NO: 6426 - DNA, 31 bp, artificial sequence
  misc_feature: DNAzyme
ctcctcagggctagctacaacgaggccaccc

SEQ ID NO: 6427 - DNA, 31 bp, artificial sequence
  misc_feature: DNAzyme
tccacgtaggctagctacaacgatcctcagc

SEQ ID NO: 6428 - DNA, 31 bp, artificial sequence
  misc_feature: DNAzyme
cctccacgggctagctacaacgaactcctca

SEQ ID NO: 6429 - DNA, 31 bp, artificial sequence
  misc_feature: DNAzyme
aacctccaggctagctacaacgagtactcct

SEQ ID NO: 6430 - DNA, 31 bp, artificial sequence
  misc_feature: DNAzyme
ccgcgtaaggctagctacaacgactccacgt

SEQ ID NO: 6431 - DNA, 31 bp, artificial sequence
  misc_feature: DNAzyme
cacccgcgggctagctacaacgaaacctcca

SEQ ID NO: 6432 - DNA, 31 bp, artificial sequence
  misc_feature: DNAzyme
cccacccgggctagctacaacgagtaacctc

SEQ ID NO: 6433 - DNA, 31 bp, artificial sequence
  misc_feature: DNAzyme
atcccccaggctagctacaacgaccgcgtaa

SEQ ID NO: 6434 - DNA, 31 bp, artificial sequence
  misc_feature: DNAzyme
agtggaaaggctagctacaacgacccccacc

SEQ ID NO: 6435 - DNA, 31 bp, artificial sequence
  misc_feature: DNAzyme
tcacgtagggctagctacaacgaggaaatcc

SEQ ID NO: 6436 - DNA, 31 bp, artificial sequence
  misc_feature: DNAzyme
ccgtcacgggctagctacaacgaagtggaaa

SEQ ID NO: 6437 - DNA, 31 bp, artificial sequence
  misc_feature: DNAzyme
gcccgtcaggctagctacaacgagtagtgga

SEQ ID NO: 6438 - DNA, 31 bp, artificial sequence
  misc_feature: DNAzyme
catgcccgggctagctacaacgacacgtagt

SEQ ID NO: 6439 - DNA, 31 bp, artificial sequence
  misc_feature: DNAzyme
tggtcatgggctagctacaacgaccgtcacg

SEQ ID NO: 6440 - DNA, 31 bp, artificial sequence
  misc_feature: DNAzyme
agtggtcaggctagctacaacgagcccgtca

SEQ ID NO: 6441 - DNA, 31 bp, artificial sequence
  misc_feature: DNAzyme
gtcagtggggctagctacaacgacatgcccg

SEQ ID NO: 6442 - DNA, 31 bp, artificial sequence
  misc_feature: DNAzyme
gttgtcagggctagctacaacgaggtcatgc

SEQ ID NO: 6443 - DNA, 31 bp, artificial sequence
  misc_feature: DNAzyme
ttacgttgggctagctacaacgacagtggtc

SEQ ID NO: 6444 - DNA, 31 bp, artificial sequence
  misc_feature: DNAzyme
attttacgggctagctacaacgatgtcagtg

SEQ ID NO: 6445 - DNA, 31 bp, artificial sequence
  misc_feature: DNAzyme
gcattttaggctagctacaacgagttgtcag

SEQ ID NO: 6446 - DNA, 31 bp, artificial sequence
  misc_feature: DNAzyme
cacgggcaggctagctacaacgatttacgtt

SEQ ID NO: 6447 - DNA, 31 bp, artificial sequence
  misc_feature: DNAzyme
ggcacgggggctagctacaacgaattttacg

SEQ ID NO: 6448 - DNA, 31 bp, artificial sequence
  misc_feature: DNAzyme
acctggcaggctagctacaacgagggcattt

SEQ ID NO: 6449 - DNA, 31 bp, artificial sequence
  misc_feature: DNAzyme
gaacctggggctagctacaacgaacgggcat

SEQ ID NO: 6450 - DNA, 31 bp, artificial sequence
  misc_feature: DNAzyme
gggcggaaggctagctacaacgactggcacg

SEQ ID NO: 6451 - DNA, 31 bp, artificial sequence
  misc_feature: DNAzyme
tcggggggggctagctacaacgaggaacctg

SEQ ID NO: 6452 - DNA, 31 bp, artificial sequence
  misc_feature: DNAzyme
gtgaagaaggctagctacaacgatcgggggg

SEQ ID NO: 6453 - DNA, 31 bp, artificial sequence
  misc_feature: DNAzyme
cacttccgggctagctacaacgagaagaatt

SEQ ID NO: 6454 - DNA, 31 bp, artificial sequence
  misc_feature: DNAzyme
cccatccaggctagctacaacgattccgtga

SEQ ID NO: 6455 - DNA, 31 bp, artificial sequence
  misc_feature: DNAzyme
gtaccccaggctagctacaacgaccacttcc

SEQ ID NO: 6456 - DNA, 31 bp, artificial sequence
  misc_feature: DNAzyme
caggcgtaggctagctacaacgacccatcca

SEQ ID NO: 6457 - DNA, 31 bp, artificial sequence
  misc_feature: DNAzyme
tgcaggcgggctagctacaacgaaccccatc

SEQ ID NO: 6458 - DNA, 31 bp, artificial sequence
  misc_feature: DNAzyme
tgtgcaggggctagctacaacgagtacccca

SEQ ID NO: 6459 - DNA, 31 bp, artificial sequence
  misc_feature: DNAzyme
tttctgtgggctagctacaacgaaggcgtac

SEQ ID NO: 6460 - DNA, 31 bp, artificial sequence
  misc_feature: DNAzyme
cgtttctgggctagctacaacgagcaggcgt

SEQ ID NO: 6461 - DNA, 31 bp, artificial sequence
  misc_feature: DNAzyme
ccggagcgggctagctacaacgattctgtgc

SEQ ID NO: 6462 - DNA, 31 bp, artificial sequence
  misc_feature: DNAzyme
cgccggagggctagctacaacgagtttctgt

SEQ ID NO: 6463 - DNA, 31 bp, artificial sequence
  misc_feature: DNAzyme
tccacacgggctagctacaacgacggagcgt

SEQ ID NO: 6464 - DNA, 31 bp, artificial sequence
  misc_feature: DNAzyme
ggtccacaggctagctacaacgagccggagc

SEQ ID NO: 6465 - DNA, 31 bp, artificial sequence
  misc_feature: DNAzyme
gaggtccaggctagctacaacgaacgccgga

SEQ ID NO: 6466 - DNA, 31 bp, artificial sequence
  misc_feature: DNAzyme
aggagaggggctagctacaacgaccacacgc

SEQ ID NO: 6467 - DNA, 31 bp, artificial sequence
  misc_feature: DNAzyme
tcctcccgggctagctacaacgaaggagagg

SEQ ID NO: 6468 - DNA, 31 bp, artificial sequence
  misc_feature: DNAzyme
gaatgtgaggctagctacaacgactcctccc

SEQ ID NO: 6469 - DNA, 31 bp, artificial sequence
  misc_feature: DNAzyme
ctggaatgggctagctacaacgagacctcct

SEQ ID NO: 6470 - DNA, 31 bp, artificial sequence
  misc_feature: DNAzyme
acctggaaggctagctacaacgagtgacctc

SEQ ID NO: 6471 - DNA, 31 bp, artificial sequence
  misc_feature: DNAzyme
gagcccgaggctagctacaacgactggaatg

SEQ ID NO: 6472 - DNA, 31 bp, artificial sequence
  misc_feature: DNAzyme
tggttgagggctagctacaacgaccgacctg

SEQ ID NO: 6473 - DNA, 31 bp, artificial sequence
  misc_feature: DNAzyme
ggtattggggctagctacaacgatgagcccg

SEQ ID NO: 6474 - DNA, 31 bp, artificial sequence
  misc_feature: DNAzyme
accaggtaggctagctacaacgatggttgag

SEQ ID NO: 6475 - DNA, 31 bp, artificial sequence
  misc_feature: DNAzyme
caaccaggggctagctacaacgaattggttg

SEQ ID NO: 6476 - DNA, 31 bp, artificial sequence
  misc_feature: DNAzyme
tgacccaaggctagctacaacgacaggtatt

SEQ ID NO: 6477 - DNA, 31 bp, artificial sequence
  misc_feature: DNAzyme
agctgtgaggctagctacaacgaccaaccag

SEQ ID NO: 6478 - DNA, 31 bp, artificial sequence
  misc_feature: DNAzyme
gggagctgggctagctacaacgagacccaac

SEQ ID NO: 6479 - DNA, 31 bp, artificial sequence
  misc_feature: DNAzyme
catgggagggctagctacaacgatgtgaccc

SEQ ID NO: 6480 - DNA, 31 bp, artificial sequence
  misc_feature: DNAzyme
ggctcgcaggctagctacaacgagggagctg

SEQ ID NO: 6481 - DNA, 31 bp, artificial sequence
  misc_feature: DNAzyme
cgggctcgggctagctacaacgaatgggagc

SEQ ID NO: 6482 - DNA, 31 bp, artificial sequence
  misc_feature: DNAzyme
ggttcgggggctagctacaacgatcgcatgg

SEQ ID NO: 6483 - DNA, 31 bp, artificial sequence
  misc_feature: DNAzyme
acatccggggctagctacaacgatcgggctc

SEQ ID NO: 6484 - DNA, 31 bp, artificial sequence
  misc_feature: DNAzyme
ctgctacaggctagctacaacgaccggttcg

SEQ ID NO: 6485 - DNA, 31 bp, artificial sequence
  misc_feature: DNAzyme
cactgctaggctagctacaacgaatccggtt

SEQ ID NO: 6486 - DNA, 31 bp, artificial sequence
  misc_feature: DNAzyme
gagcactgggctagctacaacgatacatccg

SEQ ID NO: 6487 - DNA, 31 bp, artificial sequence
  misc_feature: DNAzyme
cgtgagcaggctagctacaacgatgctacat

SEQ ID NO: 6488 - DNA, 31 bp, artificial sequence
  misc_feature: DNAzyme
gacgtgagggctagctacaacgaactgctac

SEQ ID NO: 6489 - DNA, 31 bp, artificial sequence
  misc_feature: DNAzyme
catggacgggctagctacaacgagagcactg

SEQ ID NO: 6490 - DNA, 31 bp, artificial sequence
  misc_feature: DNAzyme
agcatggaggctagctacaacgagtgagcac

SEQ ID NO: 6491 - DNA, 31 bp, artificial sequence
  misc_feature: DNAzyme
ggtgagcaggctagctacaacgaggacgtga

SEQ ID NO: 6492 - DNA, 31 bp, artificial sequence
  misc_feature: DNAzyme
tcggtgagggctagctacaacgaatggacgt

SEQ ID NO: 6493 - DNA, 31 bp, artificial sequence
  misc_feature: DNAzyme
ggggtcggggctagctacaacgagagcatgg

SEQ ID NO: 6494 - DNA, 31 bp, artificial sequence
  misc_feature: DNAzyme
gggaggggggctagctacaacgacggtgagc

SEQ ID NO: 6495 - DNA, 31 bp, artificial sequence
  misc_feature: DNAzyme
ctgtaatgggctagctacaacgagggagggg

SEQ ID NO: 6496 - DNA, 31 bp, artificial sequence
  misc_feature: DNAzyme
tcctgtaaggctagctacaacgagtgggagg

SEQ ID NO: 6497 - DNA, 31 bp, artificial sequence
  misc_feature: DNAzyme
ctctcctgggctagctacaacgaaatgtggg

SEQ ID NO: 6498 - DNA, 31 bp, artificial sequence
  misc_feature: DNAzyme
cttagccgggctagctacaacgactctcctg

SEQ ID NO: 6499 - DNA, 31 bp, artificial sequence
  misc_feature: DNAzyme
acgcttagggctagctacaacgacgtctctc

SEQ ID NO: 6500 - DNA, 31 bp, artificial sequence
  misc_feature: DNAzyme
agcctacgggctagctacaacgattagccgt

SEQ ID NO: 6501 - DNA, 31 bp, artificial sequence
  misc_feature: DNAzyme
ccagcctaggctagctacaacgagcttagcc

SEQ ID NO: 6502 - DNA, 31 bp, artificial sequence
  misc_feature: DNAzyme
ctggccagggctagctacaacgactacgctt

SEQ ID NO: 6503 - DNA, 31 bp, artificial sequence
  misc_feature: DNAzyme
ccccctggggctagctacaacgacagcctac

SEQ ID NO: 6504 - DNA, 31 bp, artificial sequence
  misc_feature: DNAzyme
gggggagaggctagctacaacgacccctggc

SEQ ID NO: 6505 - DNA, 31 bp, artificial sequence
  misc_feature: DNAzyme
ggagctggggctagctacaacgacaaggagg

SEQ ID NO: 6506 - DNA, 31 bp, artificial sequence
  misc_feature: DNAzyme
ctgaggagggctagctacaacgatggccaag

SEQ ID NO: 6507 - DNA, 31 bp, artificial sequence
  misc_feature: DNAzyme
ctggctagggctagctacaacgatgaggagc

SEQ ID NO: 6508 - DNA, 31 bp, artificial sequence
  misc_feature: DNAzyme
acagctggggctagctacaacgatagctgag

SEQ ID NO: 6509 - DNA, 31 bp, artificial sequence
  misc_feature: DNAzyme
gcagacagggctagctacaacgatggctagc

SEQ ID NO: 6510 - DNA, 31 bp, artificial sequence
  misc_feature: DNAzyme
ggcgcagaggctagctacaacgaagctggct

SEQ ID NO: 6511 - DNA, 31 bp, artificial sequence
  misc_feature: DNAzyme
agaaggcgggctagctacaacgaagacagct

SEQ ID NO: 6512 - DNA, 31 bp, artificial sequence
  misc_feature: DNAzyme
gaagaaggggctagctacaacgagcagacag

SEQ ID NO: 6513 - DNA, 31 bp, artificial sequence
  misc_feature: DNAzyme
gtatgtcgggctagctacaacgacttcgaag

SEQ ID NO: 6514 - DNA, 31 bp, artificial sequence
  misc_feature: DNAzyme
aatgtatgggctagctacaacgacgccttcg

SEQ ID NO: 6515 - DNA, 31 bp, artificial sequence
  misc_feature: DNAzyme
gtaatgtaggctagctacaacgagtcgcctt

SEQ ID NO: 6516 - DNA, 31 bp, artificial sequence
  misc_feature: DNAzyme
gggtaatgggctagctacaacgaatgtcgcc

SEQ ID NO: 6517 - DNA, 31 bp, artificial sequence
  misc_feature: DNAzyme
ttgggtaaggctagctacaacgagtatgtcg

SEQ ID NO: 6518 - DNA, 31 bp, artificial sequence
  misc_feature: DNAzyme
atattgggggctagctacaacgaaatgtatg

SEQ ID NO: 6519 - DNA, 31 bp, artificial sequence
  misc_feature: DNAzyme
gagtcataggctagctacaacgatgggtaat

SEQ ID NO: 6520 - DNA, 31 bp, artificial sequence
  misc_feature: DNAzyme
gggagtcaggctagctacaacgaattgggta

SEQ ID NO: 6521 - DNA, 31 bp, artificial sequence
  misc_feature: DNAzyme
ctggggagggctagctacaacgacatattgg

SEQ ID NO: 6522 - DNA, 31 bp, artificial sequence
  misc_feature: DNAzyme
ggtcaaagggctagctacaacgactggggag

SEQ ID NO: 6523 - DNA, 31 bp, artificial sequence
  misc_feature: DNAzyme
cgatgaggggctagctacaacgacaaagtct

SEQ ID NO: 6524 - DNA, 31 bp, artificial sequence
  misc_feature: DNAzyme
ggcctcgaggctagctacaacgagaggtcaa

SEQ ID NO: 6525 - DNA, 31 bp, artificial sequence
  misc_feature: DNAzyme
gaggttggggctagctacaacgactcgatga

SEQ ID NO: 6526 - DNA, 31 bp, artificial sequence
  misc_feature: DNAzyme
acaggaggggctagctacaacgatggcctcg

SEQ ID NO: 6527 - DNA, 31 bp, artificial sequence
  misc_feature: DNAzyme
tgccgccaggctagctacaacgaaggaggtt

SEQ ID NO: 6528 - DNA, 31 bp, artificial sequence
  misc_feature: DNAzyme
tcctgccgggctagctacaacgacacaggag

SEQ ID NO: 6529 - DNA, 31 bp, artificial sequence
  misc_feature: DNAzyme
atctcctgggctagctacaacgacgccacag

SEQ ID NO: 6530 - DNA, 31 bp, artificial sequence
  misc_feature: DNAzyme
accgcccaggctagctacaacgactcctgcc

SEQ ID NO: 6531 - DNA, 31 bp, artificial sequence
  misc_feature: DNAzyme
tgttaccgggctagctacaacgaccatctcc

SEQ ID NO: 6532 - DNA, 31 bp, artificial sequence
  misc_feature: DNAzyme
tgatgttaggctagctacaacgacgcccatc

SEQ ID NO: 6533 - DNA, 31 bp, artificial sequence
  misc_feature: DNAzyme
gagtgatgggctagctacaacgataccgccc

SEQ ID NO: 6534 - DNA, 31 bp, artificial sequence
  misc_feature: DNAzyme
gcgagtgaggctagctacaacgagttaccgc

SEQ ID NO: 6535 - DNA, 31 bp, artificial sequence
  misc_feature: DNAzyme
cacgcgagggctagctacaacgagatgttac

SEQ ID NO: 6536 - DNA, 31 bp, artificial sequence
  misc_feature: DNAzyme
actccacgggctagctacaacgagagtgatg

SEQ ID NO: 6537 - DNA, 31 bp, artificial sequence
  misc_feature: DNAzyme
tgactccaggctagctacaacgagcgagtga

SEQ ID NO: 6538 - DNA, 31 bp, artificial sequence
  misc_feature: DNAzyme
ttctctgaggctagctacaacgatccacgcg

SEQ ID NO: 6539 - DNA, 31 bp, artificial sequence
  misc_feature: DNAzyme
ctaccttaggctagctacaacgatctctgac

SEQ ID NO: 6540 - DNA, 31 bp, artificial sequence
  misc_feature: DNAzyme
ggtaactaggctagctacaacgacttattct

SEQ ID NO: 6541 - DNA, 31 bp, artificial sequence
  misc_feature: DNAzyme
cagggtaaggctagctacaacgataccttat

SEQ ID NO: 6542 - DNA, 31 bp, artificial sequence
  misc_feature: DNAzyme
gtccagggggctagctacaacgaaactacct

SEQ ID NO: 6543 - DNA, 31 bp, artificial sequence
  misc_feature: DNAzyme
caaaagagggctagctacaacgaccagggta

SEQ ID NO: 6544 - DNA, 31 bp, artificial sequence
  misc_feature: DNAzyme
gaagcgggggctagctacaacgacaaaagag

SEQ ID NO: 6545 - DNA, 31 bp, artificial sequence
  misc_feature: DNAzyme
gctcgaagggctagctacaacgagggtcaaa

SEQ ID NO: 6546 - DNA, 31 bp, artificial sequence
  misc_feature: DNAzyme
ctcctccgggctagctacaacgatcgaagcg

SEQ ID NO: 6547 - DNA, 31 bp, artificial sequence
  misc_feature: DNAzyme
ctctctcaggctagctacaacgacctcctcc

SEQ ID NO: 6548 - DNA, 31 bp, artificial sequence
  misc_feature: DNAzyme
aatggacaggctagctacaacgactctctct

SEQ ID NO: 6549 - DNA, 31 bp, artificial sequence
  misc_feature: DNAzyme
ggaatggaggctagctacaacgaacctctct

SEQ ID NO: 6550 - DNA, 31 bp, artificial sequence
  misc_feature: DNAzyme
cgccggaaggctagctacaacgaggacacct

SEQ ID NO: 6551 - DNA, 31 bp, artificial sequence
  misc_feature: DNAzyme
gatctccgggctagctacaacgacggaatgg

SEQ ID NO: 6552 - DNA, 31 bp, artificial sequence
  misc_feature: DNAzyme
ccgcaggaggctagctacaacgactccgccg

SEQ ID NO: 6553 - DNA, 31 bp, artificial sequence
  misc_feature: DNAzyme
gatttccgggctagctacaacgaaggatctc

SEQ ID NO: 6554 - DNA, 31 bp, artificial sequence
  misc_feature: DNAzyme
ttcttggaggctagctacaacgattccgcag

SEQ ID NO: 6555 - DNA, 31 bp, artificial sequence
  misc_feature: DNAzyme
gaaggaaaggctagctacaacgattcttgga

SEQ ID NO: 6556 - DNA, 31 bp, artificial sequence
  misc_feature: DNAzyme
gggtaacgggctagctacaacgatgaaggaa

SEQ ID NO: 6557 - DNA, 31 bp, artificial sequence
  misc_feature: DNAzyme
atgggtaaggctagctacaacgagctgaagg

SEQ ID NO: 6558 - DNA, 31 bp, artificial sequence
  misc_feature: DNAzyme
catatgggggctagctacaacgaaacgctga

SEQ ID NO: 6559 - DNA, 31 bp, artificial sequence
  misc_feature: DNAzyme
tgcccataggctagctacaacgagggtaacg

SEQ ID NO: 6560 - DNA, 31 bp, artificial sequence
  misc_feature: DNAzyme
cgtgcccaggctagctacaacgaatgggtaa

SEQ ID NO: 6561 - DNA, 31 bp, artificial sequence
  misc_feature: DNAzyme
cgggcgtgggctagctacaacgaccatatgg

SEQ ID NO: 6562 - DNA, 31 bp, artificial sequence
  misc_feature: DNAzyme
tccgggcgggctagctacaacgagcccatat

SEQ ID NO: 6563 - DNA, 31 bp, artificial sequence
  misc_feature: DNAzyme
aatccgggggctagctacaacgagtgcccat

SEQ ID NO: 6564 - DNA, 31 bp, artificial sequence
  misc_feature: DNAzyme
ggttgtaaggctagctacaacgaccgggcgt

SEQ ID NO: 6565 - DNA, 31 bp, artificial sequence
  misc_feature: DNAzyme
gagggttgggctagctacaacgaaatccggg

SEQ ID NO: 6566 - DNA, 31 bp, artificial sequence
  misc_feature: DNAzyme
gtggagggggctagctacaacgatgtaatcc

SEQ ID NO: 6567 - DNA, 31 bp, artificial sequence
  misc_feature: DNAzyme
tctagtagggctagctacaacgaggagggtt

SEQ ID NO: 6568 - DNA, 31 bp, artificial sequence
  misc_feature: DNAzyme
ggctctagggctagctacaacgaagtggagg

SEQ ID NO: 6569 - DNA, 31 bp, artificial sequence
  misc_feature: DNAzyme
ttccagggggctagctacaacgatctagtag

SEQ ID NO: 6570 - DNA, 31 bp, artificial sequence
  misc_feature: DNAzyme
agtctgggggctagctacaacgactttccag

SEQ ID NO: 6571 - DNA, 31 bp, artificial sequence
  misc_feature: DNAzyme
ggacgtagggctagctacaacgactgggtct

SEQ ID NO: 6572 - DNA, 31 bp, artificial sequence
  misc_feature: DNAzyme
gagggacgggctagctacaacgaagtctggg

SEQ ID NO: 6573 - DNA, 31 bp, artificial sequence
  misc_feature: DNAzyme
cggagggaggctagctacaacgagtagtctg

SEQ ID NO: 6574 - DNA, 31 bp, artificial sequence
  misc_feature: DNAzyme
gtgtaccaggctagctacaacgacggaggga

SEQ ID NO: 6575 - DNA, 31 bp, artificial sequence
  misc_feature: DNAzyme
cccgtgtaggctagctacaacgacaccggag

SEQ ID NO: 6576 - DNA, 31 bp, artificial sequence
  misc_feature: DNAzyme
cacccgtgggctagctacaacgaaccaccgg

SEQ ID NO: 6577 - DNA, 31 bp, artificial sequence
  misc_feature: DNAzyme
ggcacccgggctagctacaacgagtaccacc

SEQ ID NO: 6578 - DNA, 31 bp, artificial sequence
  misc_feature: DNAzyme
aatgggcaggctagctacaacgaccgtgtac

SEQ ID NO: 6579 - DNA, 31 bp, artificial sequence
  misc_feature: DNAzyme
gcaatgggggctagctacaacgaacccgtgt

SEQ ID NO: 6580 - DNA, 31 bp, artificial sequence
  misc_feature: DNAzyme
ggtggcaaggctagctacaacgagggcaccc

SEQ ID NO: 6581 - DNA, 31 bp, artificial sequence
  misc_feature: DNAzyme
gcaggtggggctagctacaacgaaatgggca

SEQ ID NO: 6582 - DNA, 31 bp, artificial sequence
  misc_feature: DNAzyme
ttggcaggggctagctacaacgaggcaatgg

SEQ ID NO: 6583 - DNA, 31 bp, artificial sequence
  misc_feature: DNAzyme
ggccttggggctagctacaacgaaggtggca

SEQ ID NO: 6584 - DNA, 31 bp, artificial sequence
  misc_feature: DNAzyme
tggaggggggctagctacaacgacttggcag

SEQ ID NO: 6585 - DNA, 31 bp, artificial sequence
  misc_feature: DNAzyme
aggtggtaggctagctacaacgatggagggg

SEQ ID NO: 6586 - DNA, 31 bp, artificial sequence
  misc_feature: DNAzyme
ggaggtggggctagctacaacgaattggagg

SEQ ID NO: 6587 - DNA, 31 bp, artificial sequence
  misc_feature: DNAzyme
cgtggaggggctagctacaacgaggtattgg

SEQ ID NO: 6588 - DNA, 31 bp, artificial sequence
  misc_feature: DNAzyme
ttcctccgggctagctacaacgaggaggtgg

SEQ ID NO: 6589 - DNA, 31 bp, artificial sequence
  misc_feature: DNAzyme
aacaaccgggctagctacaacgacctcttcc

SEQ ID NO: 6590 - DNA, 31 bp, artificial sequence
  misc_feature: DNAzyme
cagaacaaggctagctacaacgacgtcctct

SEQ ID NO: 6591 - DNA, 31 bp, artificial sequence
  misc_feature: DNAzyme
tgtcagaaggctagctacaacgaaaccgtcc

SEQ ID NO: 6592 - DNA, 31 bp, artificial sequence
  misc_feature: DNAzyme
ggactctgggctagctacaacgacagaacaa

SEQ ID NO: 6593 - DNA, 31 bp, artificial sequence
  misc_feature: DNAzyme
acggtggaggctagctacaacgatctgtcag

SEQ ID NO: 6594 - DNA, 31 bp, artificial sequence
  misc_feature: DNAzyme
agacacggggctagctacaacgaggactctg

SEQ ID NO: 6595 - DNA, 31 bp, artificial sequence
  misc_feature: DNAzyme
agaagacaggctagctacaacgaggtggact

SEQ ID NO: 6596 - DNA, 31 bp, artificial sequence
  misc_feature: DNAzyme
gcagaagaggctagctacaacgaacggtgga

SEQ ID NO: 6597 - DNA, 31 bp, artificial sequence
  misc_feature: DNAzyme
cgccaaggggctagctacaacgaagaagaca

SEQ ID NO: 6598 - DNA, 31 bp, artificial sequence
  misc_feature: DNAzyme
gagctccgggctagctacaacgacaaggcag

SEQ ID NO: 6599 - DNA, 31 bp, artificial sequence
  misc_feature: DNAzyme
gtggcgagggctagctacaacgatccgccaa

SEQ ID NO: 6600 - DNA, 31 bp, artificial sequence
  misc_feature: DNAzyme
ctttgtggggctagctacaacgagagctccg

SEQ ID NO: 6601 - DNA, 31 bp, artificial sequence
  misc_feature: DNAzyme
ggtctttgggctagctacaacgaggcgagct

SEQ ID NO: 6602 - DNA, 31 bp, artificial sequence
  misc_feature: DNAzyme
gccgaaggggctagctacaacgactttgtgg

SEQ ID NO: 6603 - DNA, 31 bp, artificial sequence
  misc_feature: DNAzyme
cagagctgggctagctacaacgacgaaggtc

SEQ ID NO: 6604 - DNA, 31 bp, artificial sequence
  misc_feature: DNAzyme
attcagagggctagctacaacgatgccgaag

SEQ ID NO: 6605 - DNA, 31 bp, artificial sequence
  misc_feature: DNAzyme
gccgatgaggctagctacaacgatcagagct

SEQ ID NO: 6606 - DNA, 31 bp, artificial sequence
  misc_feature: DNAzyme
gcggccgaggctagctacaacgagattcaga

SEQ ID NO: 6607 - DNA, 31 bp, artificial sequence
  misc_feature: DNAzyme
atcagcggggctagctacaacgacgatgatt

SEQ ID NO: 6608 - DNA, 31 bp, artificial sequence
  misc_feature: DNAzyme
tctatcagggctagctacaacgaggccgatg

SEQ ID NO: 6609 - DNA, 31 bp, artificial sequence
  misc_feature: DNAzyme
tacctctaggctagctacaacgacagcggcc

SEQ ID NO: 6610 - DNA, 31 bp, artificial sequence
  misc_feature: DNAzyme
ttgccgtaggctagctacaacgactctatca

SEQ ID NO: 6611 - DNA, 31 bp, artificial sequence
  misc_feature: DNAzyme
ggttgccgggctagctacaacgaacctctat

SEQ ID NO: 6612 - DNA, 31 bp, artificial sequence
  misc_feature: DNAzyme
ggcggttgggctagctacaacgacgtacctc

SEQ ID NO: 6613 - DNA, 31 bp, artificial sequence
  misc_feature: DNAzyme
gggggcggggctagctacaacgatgccgtac

SEQ ID NO: 6614 - DNA, 31 bp, artificial sequence
  misc_feature: DNAzyme
ggggggggggctagctacaacgaggttgccg

SEQ ID NO: 6615 - DNA, 31 bp, artificial sequence
  misc_feature: DNAzyme
aggtctggggctagctacaacgacggggggg

SEQ ID NO: 6616 - DNA, 31 bp, artificial sequence
  misc_feature: DNAzyme
attggaggggctagctacaacgactggtcgg

SEQ ID NO: 6617 - DNA, 31 bp, artificial sequence
  misc_feature: DNAzyme
caccgtcaggctagctacaacgatggaggtc

SEQ ID NO: 6618 - DNA, 31 bp, artificial sequence
  misc_feature: DNAzyme
cgtcaccgggctagctacaacgacattggag

SEQ ID NO: 6619 - DNA, 31 bp, artificial sequence
  misc_feature: DNAzyme
ctgcgtcaggctagctacaacgacgtcattg

SEQ ID NO: 6620 - DNA, 31 bp, artificial sequence
  misc_feature: DNAzyme
atcctgcgggctagctacaacgacaccgtca

SEQ ID NO: 6621 - DNA, 31 bp, artificial sequence
  misc_feature: DNAzyme
ggatcctgggctagctacaacgagtcaccgt

SEQ ID NO: 6622 - DNA, 31 bp, artificial sequence
  misc_feature: DNAzyme
acgtcggaggctagctacaacgacctgcgtc

SEQ ID NO: 6623 - DNA, 31 bp, artificial sequence
  misc_feature: DNAzyme
actcaacgggctagctacaacgacggatcct

SEQ ID NO: 6624 - DNA, 31 bp, artificial sequence
  misc_feature: DNAzyme
cgactcaaggctagctacaacgagtcggatc

SEQ ID NO: 6625 - DNA, 31 bp, artificial sequence
  misc_feature: DNAzyme
gagtacgaggctagctacaacgatcaacgtc

SEQ ID NO: 6626 - DNA, 31 bp, artificial sequence
  misc_feature: DNAzyme
gaggagtaggctagctacaacgagactcaac

SEQ ID NO: 6627 - DNA, 31 bp, artificial sequence
  misc_feature: DNAzyme
tagaggagggctagctacaacgaacgactca

SEQ ID NO: 6628 - DNA, 31 bp, artificial sequence
  misc_feature: DNAzyme
ggggggcaggctagctacaacgaagaggagt

SEQ ID NO: 6629 - DNA, 31 bp, artificial sequence
  misc_feature: DNAzyme
agggggggggctagctacaacgaatagagga

SEQ ID NO: 6630 - DNA, 31 bp, artificial sequence
  misc_feature: DNAzyme
tcccccggggctagctacaacgatccccctc

SEQ ID NO: 6631 - DNA, 31 bp, artificial sequence
  misc_feature: DNAzyme
gatcgggaggctagctacaacgacccccggc

SEQ ID NO: 6632 - DNA, 31 bp, artificial sequence
  misc_feature: DNAzyme
cgctgagaggctagctacaacgacgggatcc

SEQ ID NO: 6633 - DNA, 31 bp, artificial sequence
  misc_feature: DNAzyme
acccgtcgggctagctacaacgatgagatcg

SEQ ID NO: 6634 - DNA, 31 bp, artificial sequence
  misc_feature: DNAzyme
aagacccgggctagctacaacgacgctgaga

SEQ ID NO: 6635 - DNA, 31 bp, artificial sequence
  misc_feature: DNAzyme
gaccaagaggctagctacaacgaccgtcgct

SEQ ID NO: 6636 - DNA, 31 bp, artificial sequence
  misc_feature: DNAzyme
acggtagaggctagctacaacgacaagaccc

SEQ ID NO: 6637 - DNA, 31 bp, artificial sequence
  misc_feature: DNAzyme
gctcacggggctagctacaacgaagaccaag

SEQ ID NO: 6638 - DNA, 31 bp, artificial sequence
  misc_feature: DNAzyme
ttcgctcaggctagctacaacgaggtagacc

SEQ ID NO: 6639 - DNA, 31 bp, artificial sequence
  misc_feature: DNAzyme
cctcttcgggctagctacaacgatcacggta

SEQ ID NO: 6640 - DNA, 31 bp, artificial sequence
  misc_feature: DNAzyme
ctcgccagggctagctacaacgactcttcgc

SEQ ID NO: 6641 - DNA, 31 bp, artificial sequence
  misc_feature: DNAzyme
catcctcgggctagctacaacgacagcctct

SEQ ID NO: 6642 - DNA, 31 bp, artificial sequence
  misc_feature: DNAzyme
agacgacaggctagctacaacgacctcgcca

SEQ ID NO: 6643 - DNA, 31 bp, artificial sequence
  misc_feature: DNAzyme
gcagacgaggctagctacaacgaatcctcgc

SEQ ID NO: 6644 - DNA, 31 bp, artificial sequence
  misc_feature: DNAzyme
gcagcagaggctagctacaacgagacatcct

SEQ ID NO: 6645 - DNA, 31 bp, artificial sequence
  misc_feature: DNAzyme
tcgagcagggctagctacaacgaagacgaca

SEQ ID NO: 6646 - DNA, 31 bp, artificial sequence
  misc_feature: DNAzyme
acatcgagggctagctacaacgaagcagacg

SEQ ID NO: 6647 - DNA, 31 bp, artificial sequence
  misc_feature: DNAzyme
gtaggacaggctagctacaacgacgagcagc

SEQ ID NO: 6648 - DNA, 31 bp, artificial sequence
  misc_feature: DNAzyme
gtgtaggaggctagctacaacgaatcgagca

SEQ ID NO: 6649 - DNA, 31 bp, artificial sequence
  misc_feature: DNAzyme
tccatgtgggctagctacaacgaaggacatc

SEQ ID NO: 6650 - DNA, 31 bp, artificial sequence
  misc_feature: DNAzyme
cgtccatgggctagctacaacgagtaggaca

SEQ ID NO: 6651 - DNA, 31 bp, artificial sequence
  misc_feature: DNAzyme
cccgtccaggctagctacaacgagtgtagga

SEQ ID NO: 6652 - DNA, 31 bp, artificial sequence
  misc_feature: DNAzyme
ggcgcccgggctagctacaacgaccatgtgt

SEQ ID NO: 6653 - DNA, 31 bp, artificial sequence
  misc_feature: DNAzyme
tcagggcgggctagctacaacgaccgtccat

SEQ ID NO: 6654 - DNA, 31 bp, artificial sequence
  misc_feature: DNAzyme
gatcagggggctagctacaacgagcccgtcc

SEQ ID NO: 6655 - DNA, 31 bp, artificial sequence
  misc_feature: DNAzyme
tggcgtgaggctagctacaacgacagggcgc

SEQ ID NO: 6656 - DNA, 31 bp, artificial sequence
  misc_feature: DNAzyme
gcatggcgggctagctacaacgagatcaggg

SEQ ID NO: 6657 - DNA, 31 bp, artificial sequence
  misc_feature: DNAzyme
gcgcatggggctagctacaacgagtgatcag

SEQ ID NO: 6658 - DNA, 31 bp, artificial sequence
  misc_feature: DNAzyme
gcagcgcaggctagctacaacgaggcgtgat

SEQ ID NO: 6659 - DNA, 31 bp, artificial sequence
  misc_feature: DNAzyme
ccgcagcgggctagctacaacgaatggcgtg

SEQ ID NO: 6660 - DNA, 31 bp, artificial sequence
  misc_feature: DNAzyme
ctccgcagggctagctacaacgagcatggcg

SEQ ID NO: 6661 - DNA, 31 bp, artificial sequence
  misc_feature: DNAzyme
ttcctccgggctagctacaacgaagcgcatg

SEQ ID NO: 6662 - DNA, 31 bp, artificial sequence
  misc_feature: DNAzyme
gcaacttgggctagctacaacgatttcctcc

SEQ ID NO: 6663 - DNA, 31 bp, artificial sequence
  misc_feature: DNAzyme
atgggcaaggctagctacaacgattgctttc

SEQ ID NO: 6664 - DNA, 31 bp, artificial sequence
  misc_feature: DNAzyme
ttgatgggggctagctacaacgaaacttgct

SEQ ID NO: 6665 - DNA, 31 bp, artificial sequence
  misc_feature: DNAzyme
cgcgttgaggctagctacaacgagggcaact

SEQ ID NO: 6666 - DNA, 31 bp, artificial sequence
  misc_feature: DNAzyme
tcaacgcgggctagctacaacgatgatgggc

SEQ ID NO: 6667 - DNA, 31 bp, artificial sequence
  misc_feature: DNAzyme
gctcaacgggctagctacaacgagttgatgg

SEQ ID NO: 6668 - DNA, 31 bp, artificial sequence
  misc_feature: DNAzyme
ttgctcaaggctagctacaacgagcgttgat

SEQ ID NO: 6669 - DNA, 31 bp, artificial sequence
  misc_feature: DNAzyme
aagagttgggctagctacaacgatcaacgcg

SEQ ID NO: 6670 - DNA, 31 bp, artificial sequence
  misc_feature: DNAzyme
gcaaagagggctagctacaacgatgctcaac

SEQ ID NO: 6671 - DNA, 31 bp, artificial sequence
  misc_feature: DNAzyme
tgacgcagggctagctacaacgaaaagagtt

SEQ ID NO: 6672 - DNA, 31 bp, artificial sequence
  misc_feature: DNAzyme
tggtgacgggctagctacaacgaagcaaaga

SEQ ID NO: 6673 - DNA, 31 bp, artificial sequence
  misc_feature: DNAzyme
tgtggtgaggctagctacaacgagcagcaaa

SEQ ID NO: 6674 - DNA, 31 bp, artificial sequence
  misc_feature: DNAzyme
tgttgtggggctagctacaacgagacgcagc

SEQ ID NO: 6675 - DNA, 31 bp, artificial sequence
  misc_feature: DNAzyme
ccatgttgggctagctacaacgaggtgacgc

SEQ ID NO: 6676 - DNA, 31 bp, artificial sequence
  misc_feature: DNAzyme
agaccatgggctagctacaacgatgtggtga

SEQ ID NO: 6677 - DNA, 31 bp, artificial sequence
  misc_feature: DNAzyme
gtagaccaggctagctacaacgagttgtggt

SEQ ID NO: 6678 - DNA, 31 bp, artificial sequence
  misc_feature: DNAzyme
agcgtagaggctagctacaacgacatgttgt

SEQ ID NO: 6679 - DNA, 31 bp, artificial sequence
  misc_feature: DNAzyme
ttgtagcgggctagctacaacgaagaccatg

SEQ ID NO: 6680 - DNA, 31 bp, artificial sequence
  misc_feature: DNAzyme
tgttgtagggctagctacaacgagtagacca

SEQ ID NO: 6681 - DNA, 31 bp, artificial sequence
  misc_feature: DNAzyme
agatgttgggctagctacaacgaagcgtaga

SEQ ID NO: 6682 - DNA, 31 bp, artificial sequence
  misc_feature: DNAzyme
gcgagatgggctagctacaacgatgtagcgt

SEQ ID NO: 6683 - DNA, 31 bp, artificial sequence
  misc_feature: DNAzyme
ctgcgagaggctagctacaacgagttgtagc

SEQ ID NO: 6684 - DNA, 31 bp, artificial sequence
  misc_feature: DNAzyme
ttgcgctgggctagctacaacgagagatgtt

SEQ ID NO: 6685 - DNA, 31 bp, artificial sequence
  misc_feature: DNAzyme
ggcttgcgggctagctacaacgatgcgagat

SEQ ID NO: 6686 - DNA, 31 bp, artificial sequence
  misc_feature: DNAzyme
ctggcttgggctagctacaacgagctgcgag

SEQ ID NO: 6687 - DNA, 31 bp, artificial sequence
  misc_feature: DNAzyme
gccgctggggctagctacaacgattgcgctg

SEQ ID NO: 6688 - DNA, 31 bp, artificial sequence
  misc_feature: DNAzyme
ttctgccgggctagctacaacgatggcttgc

SEQ ID NO: 6689 - DNA, 31 bp, artificial sequence
  misc_feature: DNAzyme
ttcttctgggctagctacaacgacgctggct

SEQ ID NO: 6690 - DNA, 31 bp, artificial sequence
  misc_feature: DNAzyme
aaaggtgaggctagctacaacgacttcttct

SEQ ID NO: 6691 - DNA, 31 bp, artificial sequence
  misc_feature: DNAzyme
gtcaaaggggctagctacaacgagaccttct

SEQ ID NO: 6692 - DNA, 31 bp, artificial sequence
  misc_feature: DNAzyme
gcagtctgggctagctacaacgacaaaggtg

SEQ ID NO: 6693 - DNA, 31 bp, artificial sequence
  misc_feature: DNAzyme
acttgcagggctagctacaacgactgtcaaa

SEQ ID NO: 6694 - DNA, 31 bp, artificial sequence
  misc_feature: DNAzyme
aggacttgggctagctacaacgaagtctgtc

SEQ ID NO: 6695 - DNA, 31 bp, artificial sequence
  misc_feature: DNAzyme
gtccaggaggctagctacaacgattgcagtc

SEQ ID NO: 6696 - DNA, 31 bp, artificial sequence
  misc_feature: DNAzyme
agtggtcgggctagctacaacgaccaggact

SEQ ID NO: 6697 - DNA, 31 bp, artificial sequence
  misc_feature: DNAzyme
ggtagtggggctagctacaacgacgtccagg

SEQ ID NO: 6698 - DNA, 31 bp, artificial sequence
  misc_feature: DNAzyme
cccggtagggctagctacaacgaggtcgtcc

SEQ ID NO: 6699 - DNA, 31 bp, artificial sequence
  misc_feature: DNAzyme
cgtcccggggctagctacaacgaagtggtcg

SEQ ID NO: 6700 - DNA, 31 bp, artificial sequence
  misc_feature: DNAzyme
tgagcacgggctagctacaacgacccggtag

SEQ ID NO: 6701 - DNA, 31 bp, artificial sequence
  misc_feature: DNAzyme
cttgagcaggctagctacaacgagtcccggt

SEQ ID NO: 6702 - DNA, 31 bp, artificial sequence
  misc_feature: DNAzyme
tccttgagggctagctacaacgaacgtcccg

SEQ ID NO: 6703 - DNA, 31 bp, artificial sequence
  misc_feature: DNAzyme
cgccttcaggctagctacaacgactccttga

SEQ ID NO: 6704 - DNA, 31 bp, artificial sequence
  misc_feature: DNAzyme
cgccttcgggctagctacaacgacttcatct

SEQ ID NO: 6705 - DNA, 31 bp, artificial sequence
  misc_feature: DNAzyme
tgtggacgggctagctacaacgacttcgcct

SEQ ID NO: 6706 - DNA, 31 bp, artificial sequence
  misc_feature: DNAzyme
actgtggaggctagctacaacgagccttcgc

SEQ ID NO: 6707 - DNA, 31 bp, artificial sequence
  misc_feature: DNAzyme
cttaactgggctagctacaacgaggacgcct

SEQ ID NO: 6708 - DNA, 31 bp, artificial sequence
  misc_feature: DNAzyme
agccttaaggctagctacaacgatgtggacg

SEQ ID NO: 6709 - DNA, 31 bp, artificial sequence
  misc_feature: DNAzyme
aagtttagggctagctacaacgacttaactg

SEQ ID NO: 6710 - DNA, 31 bp, artificial sequence
  misc_feature: DNAzyme
gatagaagggctagctacaacgattagcctt

SEQ ID NO: 6711 - DNA, 31 bp, artificial sequence
  misc_feature: DNAzyme
tctacggaggctagctacaacgaagaagttt

SEQ ID NO: 6712 - DNA, 31 bp, artificial sequence
  misc_feature: DNAzyme
ttcctctaggctagctacaacgaggatagaa

SEQ ID NO: 6713 - DNA, 31 bp, artificial sequence
  misc_feature: DNAzyme
tctgcaggggctagctacaacgattcctcta

SEQ ID NO: 6714 - DNA, 31 bp, artificial sequence
  misc_feature: DNAzyme
tcagtctgggctagctacaacgaaggcttcc

SEQ ID NO: 6715 - DNA, 31 bp, artificial sequence
  misc_feature: DNAzyme
ggcgtcagggctagctacaacgactgcaggc

SEQ ID NO: 6716 - DNA, 31 bp, artificial sequence
  misc_feature: DNAzyme
tgggggcgggctagctacaacgacagtctgc

SEQ ID NO: 6717 - DNA, 31 bp, artificial sequence
  misc_feature: DNAzyme
tgtgggggggctagctacaacgagtcagtct

SEQ ID NO: 6718 - DNA, 31 bp, artificial sequence
  misc_feature: DNAzyme
gccgaatgggctagctacaacgagggggcgt

SEQ ID NO: 6719 - DNA, 31 bp, artificial sequence
  misc_feature: DNAzyme
tggccgaaggctagctacaacgagtgggggc

SEQ ID NO: 6720 - DNA, 31 bp, artificial sequence
  misc_feature: DNAzyme
ggacctggggctagctacaacgacgaatgtg

SEQ ID NO: 6721 - DNA, 31 bp, artificial sequence
  misc_feature: DNAzyme
aatttggaggctagctacaacgactggccga

SEQ ID NO: 6722 - DNA, 31 bp, artificial sequence
  misc_feature: DNAzyme
taaccaaaggctagctacaacgattggacct

SEQ ID NO: 6723 - DNA, 31 bp, artificial sequence
  misc_feature: DNAzyme
ccccataaggctagctacaacgacaaatttg

SEQ ID NO: 6724 - DNA, 31 bp, artificial sequence
  misc_feature: DNAzyme
ttgccccaggctagctacaacgaaaccaaat

SEQ ID NO: 6725 - DNA, 31 bp, artificial sequence
  misc_feature: DNAzyme
gtcctttgggctagctacaacgacccataac

SEQ ID NO: 6726 - DNA, 31 bp, artificial sequence
  misc_feature: DNAzyme
tccggacgggctagctacaacgacctttgcc

SEQ ID NO: 6727 - DNA, 31 bp, artificial sequence
  misc_feature: DNAzyme
gttccggaggctagctacaacgagtcctttg

SEQ ID NO: 6728 - DNA, 31 bp, artificial sequence
  misc_feature: DNAzyme
tggataggggctagctacaacgatccggacg

SEQ ID NO: 6729 - DNA, 31 bp, artificial sequence
  misc_feature: DNAzyme
ccgctggaggctagctacaacgaaggttccg

SEQ ID NO: 6730 - DNA, 31 bp, artificial sequence
  misc_feature: DNAzyme
cggccccgggctagctacaacgatggatagg

SEQ ID NO: 6731 - DNA, 31 bp, artificial sequence
  misc_feature: DNAzyme
gttgacggggctagctacaacgacccgctgg

SEQ ID NO: 6732 - DNA, 31 bp, artificial sequence
  misc_feature: DNAzyme
gtggttgaggctagctacaacgaggccccgc

SEQ ID NO: 6733 - DNA, 31 bp, artificial sequence
  misc_feature: DNAzyme
ggatgtggggctagctacaacgatgacggcc

SEQ ID NO: 6734 - DNA, 31 bp, artificial sequence
  misc_feature: DNAzyme
agcggatgggctagctacaacgaggttgacg

SEQ ID NO: 6735 - DNA, 31 bp, artificial sequence
  misc_feature: DNAzyme
ggagcggaggctagctacaacgagtggttga

SEQ ID NO: 6736 - DNA, 31 bp, artificial sequence
  misc_feature: DNAzyme
acacggagggctagctacaacgaggatgtgg

SEQ ID NO: 6737 - DNA, 31 bp, artificial sequence
  misc_feature: DNAzyme
cttccacaggctagctacaacgaggagcgga

SEQ ID NO: 6738 - DNA, 31 bp, artificial sequence
  misc_feature: DNAzyme
tccttccaggctagctacaacgaacggagcg

SEQ ID NO: 6739 - DNA, 31 bp, artificial sequence
  misc_feature: DNAzyme
ccagcaagggctagctacaacgaccttccac

SEQ ID NO: 6740 - DNA, 31 bp, artificial sequence
  misc_feature: DNAzyme
tcttccagggctagctacaacgaaagtcctt

SEQ ID NO: 6741 - DNA, 31 bp, artificial sequence
  misc_feature: DNAzyme
tctcagtgggctagctacaacgacttccagc

SEQ ID NO: 6742 - DNA, 31 bp, artificial sequence
  misc_feature: DNAzyme
tgtctcagggctagctacaacgagtcttcca

SEQ ID NO: 6743 - DNA, 31 bp, artificial sequence
  misc_feature: DNAzyme
aattggtgggctagctacaacgactcagtgt

SEQ ID NO: 6744 - DNA, 31 bp, artificial sequence
  misc_feature: DNAzyme
tcaattggggctagctacaacgagtctcagt

SEQ ID NO: 6745 - DNA, 31 bp, artificial sequence
  misc_feature: DNAzyme
ggtatcaaggctagctacaacgatggtgtct

SEQ ID NO: 6746 - DNA, 31 bp, artificial sequence
  misc_feature: DNAzyme
tggtggtaggctagctacaacgacaattggt

SEQ ID NO: 6747 - DNA, 31 bp, artificial sequence
  misc_feature: DNAzyme
gatggtggggctagctacaacgaatcaattg

SEQ ID NO: 6748 - DNA, 31 bp, artificial sequence
  misc_feature: DNAzyme
catgatggggctagctacaacgaggtatcaa

SEQ ID NO: 6749 - DNA, 31 bp, artificial sequence
  misc_feature: DNAzyme
tgccatgaggctagctacaacgaggtggtat

SEQ ID NO: 6750 - DNA, 31 bp, artificial sequence
  misc_feature: DNAzyme
ttttgccaggctagctacaacgagatggtgg

SEQ ID NO: 6751 - DNA, 31 bp, artificial sequence
  misc_feature: DNAzyme
attttttgggctagctacaacgacatgatgg

SEQ ID NO: 6752 - DNA, 31 bp, artificial sequence
  misc_feature: DNAzyme
aaacctcaggctagctacaacgatttttgcc

SEQ ID NO: 6753 - DNA, 31 bp, artificial sequence
  misc_feature: DNAzyme
gcagaaaaggctagctacaacgactcatttt

SEQ ID NO: 6754 - DNA, 31 bp, artificial sequence
  misc_feature: DNAzyme
gttggacgggctagctacaacgaagaaaacc

SEQ ID NO: 6755 - DNA, 31 bp, artificial sequence
  misc_feature: DNAzyme
tggttggaggctagctacaacgagcagaaaa

SEQ ID NO: 6756 - DNA, 31 bp, artificial sequence
  misc_feature: DNAzyme
ttctctggggctagctacaacgatggacgca

SEQ ID NO: 6757 - DNA, 31 bp, artificial sequence
  misc_feature: DNAzyme
gcttgcggggctagctacaacgactcctttc

SEQ ID NO: 6758 - DNA, 31 bp, artificial sequence
  misc_feature: DNAzyme
ctggcttgggctagctacaacgaggcctcct

SEQ ID NO: 6759 - DNA, 31 bp, artificial sequence
  misc_feature: DNAzyme
cgagctggggctagctacaacgattgcggcc

SEQ ID NO: 6760 - DNA, 31 bp, artificial sequence
  misc_feature: DNAzyme
aaggcgagggctagctacaacgatggcttgc

SEQ ID NO: 6761 - DNA, 31 bp, artificial sequence
  misc_feature: DNAzyme
cgataaggggctagctacaacgagagctggc

SEQ ID NO: 6762 - DNA, 31 bp, artificial sequence
  misc_feature: DNAzyme
gaacacgaggctagctacaacgaaaggcgag

SEQ ID NO: 6763 - DNA, 31 bp, artificial sequence
  misc_feature: DNAzyme
tgggaacaggctagctacaacgagataaggc

SEQ ID NO: 6764 - DNA, 31 bp, artificial sequence
  misc_feature: DNAzyme
tctgggaaggctagctacaacgaacgataag

SEQ ID NO: 6765 - DNA, 31 bp, artificial sequence
  misc_feature: DNAzyme
cccccaagggctagctacaacgactgggaac

SEQ ID NO: 6766 - DNA, 31 bp, artificial sequence
  misc_feature: DNAzyme
cacacgaaggctagctacaacgaccccaagt

SEQ ID NO: 6767 - DNA, 31 bp, artificial sequence
  misc_feature: DNAzyme
cgcacacaggctagctacaacgagaaccccc

SEQ ID NO: 6768 - DNA, 31 bp, artificial sequence
  misc_feature: DNAzyme
ctcgcacaggctagctacaacgaacgaaccc

SEQ ID NO: 6769 - DNA, 31 bp, artificial sequence
  misc_feature: DNAzyme
ttctcgcaggctagctacaacgaacacgaac

SEQ ID NO: 6770 - DNA, 31 bp, artificial sequence
  misc_feature: DNAzyme
ttttctcgggctagctacaacgaacacacga

SEQ ID NO: 6771 - DNA, 31 bp, artificial sequence
  misc_feature: DNAzyme
aagggccaggctagctacaacgatttctcgc

SEQ ID NO: 6772 - DNA, 31 bp, artificial sequence
  misc_feature: DNAzyme
gtaaagggggctagctacaacgacattttct

SEQ ID NO: 6773 - DNA, 31 bp, artificial sequence
  misc_feature: DNAzyme
ccacgtcgggctagctacaacgaaaagggcc

SEQ ID NO: 6774 - DNA, 31 bp, artificial sequence
  misc_feature: DNAzyme
agaccacgggctagctacaacgacgtaaagg

SEQ ID NO: 6775 - DNA, 31 bp, artificial sequence
  misc_feature: DNAzyme
ggagaccaggctagctacaacgagtcgtaaa

SEQ ID NO: 6776 - DNA, 31 bp, artificial sequence
  misc_feature: DNAzyme
ggtggagaggctagctacaacgacacgtcgt

SEQ ID NO: 6777 - DNA, 31 bp, artificial sequence
  misc_feature: DNAzyme
aggaagggggctagctacaacgaggagacca

SEQ ID NO: 6778 - DNA, 31 bp, artificial sequence
  misc_feature: DNAzyme
catcacggggctagctacaacgactgaggaa

SEQ ID NO: 6779 - DNA, 31 bp, artificial sequence
  misc_feature: DNAzyme
gcccatcaggctagctacaacgaggcctgag

SEQ ID NO: 6780 - DNA, 31 bp, artificial sequence
  misc_feature: DNAzyme
agagcccaggctagctacaacgacacggcct

SEQ ID NO: 6781 - DNA, 31 bp, artificial sequence
  misc_feature: DNAzyme
atgaagagggctagctacaacgaccatcacg

SEQ ID NO: 6782 - DNA, 31 bp, artificial sequence
  misc_feature: DNAzyme
aatccgtaggctagctacaacgagaagagcc

SEQ ID NO: 6783 - DNA, 31 bp, artificial sequence
  misc_feature: DNAzyme
ggaatccgggctagctacaacgaatgaagag

SEQ ID NO: 6784 - DNA, 31 bp, artificial sequence
  misc_feature: DNAzyme
tactggaaggctagctacaacgaccgtatga

SEQ ID NO: 6785 - DNA, 31 bp, artificial sequence
  misc_feature: DNAzyme
ggagagtaggctagctacaacgatggaatcc

SEQ ID NO: 6786 - DNA, 31 bp, artificial sequence
  misc_feature: DNAzyme
caggagagggctagctacaacgaactggaat

SEQ ID NO: 6787 - DNA, 31 bp, artificial sequence
  misc_feature: DNAzyme
acccgctgggctagctacaacgaccaggaga

SEQ ID NO: 6788 - DNA, 31 bp, artificial sequence
  misc_feature: DNAzyme
tcaacccgggctagctacaacgatgcccagg

SEQ ID NO: 6789 - DNA, 31 bp, artificial sequence
  misc_feature: DNAzyme
gaactcaaggctagctacaacgaccgctgcc

SEQ ID NO: 6790 - DNA, 31 bp, artificial sequence
  misc_feature: DNAzyme
accaggaaggctagctacaacgatcaacccg

SEQ ID NO: 6791 - DNA, 31 bp, artificial sequence
  misc_feature: DNAzyme
ggcattcaggctagctacaacgacaggaact

SEQ ID NO: 6792 - DNA, 31 bp, artificial sequence
  misc_feature: DNAzyme
tccaggcaggctagctacaacgatcaccagg

SEQ ID NO: 6793 - DNA, 31 bp, artificial sequence
  misc_feature: DNAzyme
tttccaggggctagctacaacgaattcacca

SEQ ID NO: 6794 - DNA, 31 bp, artificial sequence
  misc_feature: DNAzyme
ttctttgaggctagctacaacgattccaggc

SEQ ID NO: 6795 - DNA, 31 bp, artificial sequence
  misc_feature: DNAzyme
atagggcaggctagctacaacgattctttga

SEQ ID NO: 6796 - DNA, 31 bp, artificial sequence
  misc_feature: DNAzyme
ccatagggggctagctacaacgaatttcttt

SEQ ID NO: 6797 - DNA, 31 bp, artificial sequence
  misc_feature: DNAzyme
aaagcccaggctagctacaacgaagggcatt

SEQ ID NO: 6798 - DNA, 31 bp, artificial sequence
  misc_feature: DNAzyme
atgcaaagggctagctacaacgaccataggg

SEQ ID NO: 6799 - DNA, 31 bp, artificial sequence
  misc_feature: DNAzyme
gtcatatgggctagctacaacgaaaagccca

SEQ ID NO: 6800 - DNA, 31 bp, artificial sequence
  misc_feature: DNAzyme
gtgtcataggctagctacaacgagcaaagcc

SEQ ID NO: 6801 - DNA, 31 bp, artificial sequence
  misc_feature: DNAzyme
gggtgtcaggctagctacaacgaatgcaaag

SEQ ID NO: 6802 - DNA, 31 bp, artificial sequence
  misc_feature: DNAzyme
agcgggtgggctagctacaacgacatatgca

SEQ ID NO: 6803 - DNA, 31 bp, artificial sequence
  misc_feature: DNAzyme
acagcgggggctagctacaacgagtcatatg

SEQ ID NO: 6804 - DNA, 31 bp, artificial sequence
  misc_feature: DNAzyme
cgaaacagggctagctacaacgagggtgtca

SEQ ID NO: 6805 - DNA, 31 bp, artificial sequence
  misc_feature: DNAzyme
agtcgaaaggctagctacaacgaagcgggtg

SEQ ID NO: 6806 - DNA, 31 bp, artificial sequence
  misc_feature: DNAzyme
ctgttgagggctagctacaacgacgaaacag

SEQ ID NO: 6807 - DNA, 31 bp, artificial sequence
  misc_feature: DNAzyme
ggtgactgggctagctacaacgatgagtcga

SEQ ID NO: 6808 - DNA, 31 bp, artificial sequence
  misc_feature: DNAzyme
ctcggtgaggctagctacaacgatgttgagt

SEQ ID NO: 6809 - DNA, 31 bp, artificial sequence
  misc_feature: DNAzyme
actctcggggctagctacaacgagactgttg

SEQ ID NO: 6810 - DNA, 31 bp, artificial sequence
  misc_feature: DNAzyme
ggatgtcaggctagctacaacgatctcggtg

SEQ ID NO: 6811 - DNA, 31 bp, artificial sequence
  misc_feature: DNAzyme
cacggatgggctagctacaacgacactctcg

SEQ ID NO: 6812 - DNA, 31 bp, artificial sequence
  misc_feature: DNAzyme
gacacggaggctagctacaacgagtcactct

SEQ ID NO: 6813 - DNA, 31 bp, artificial sequence
  misc_feature: DNAzyme
cctcgacaggctagctacaacgaggatgtca

SEQ ID NO: 6814 - DNA, 31 bp, artificial sequence
  misc_feature: DNAzyme
ctcctcgaggctagctacaacgaacggatgt

SEQ ID NO: 6815 - DNA, 31 bp, artificial sequence
  misc_feature: DNAzyme
taaattgaggctagctacaacgatcctcgac

SEQ ID NO: 6816 - DNA, 31 bp, artificial sequence
  misc_feature: DNAzyme
ttggtaaaggctagctacaacgatgactcct

SEQ ID NO: 6817 - DNA, 31 bp, artificial sequence
  misc_feature: DNAzyme
aacattggggctagctacaacgaaaattgac

SEQ ID NO: 6818 - DNA, 31 bp, artificial sequence
  misc_feature: DNAzyme
tcacaacaggctagctacaacgatggtaaat

SEQ ID NO: 6819 - DNA, 31 bp, artificial sequence
  misc_feature: DNAzyme
agtcacaaggctagctacaacgaattggtaa

SEQ ID NO: 6820 - DNA, 31 bp, artificial sequence
  misc_feature: DNAzyme
ccaagtcaggctagctacaacgaaacattgg

SEQ ID NO: 6821 - DNA, 31 bp, artificial sequence
  misc_feature: DNAzyme
gggccaagggctagctacaacgacacaacat

SEQ ID NO: 6822 - DNA, 31 bp, artificial sequence
  misc_feature: DNAzyme
ttcgggggggctagctacaacgacaagtcac

SEQ ID NO: 6823 - DNA, 31 bp, artificial sequence
  misc_feature: DNAzyme
ctgtctggggctagctacaacgattcggggg

SEQ ID NO: 6824 - DNA, 31 bp, artificial sequence
  misc_feature: DNAzyme
atggcctgggctagctacaacgactggcttc

SEQ ID NO: 6825 - DNA, 31 bp, artificial sequence
  misc_feature: DNAzyme
ccttatggggctagctacaacgactgtctgg

SEQ ID NO: 6826 - DNA, 31 bp, artificial sequence
  misc_feature: DNAzyme
cgaccttaggctagctacaacgaggcctgtc

SEQ ID NO: 6827 - DNA, 31 bp, artificial sequence
  misc_feature: DNAzyme
gtgagcgaggctagctacaacgacttatggc

SEQ ID NO: 6828 - DNA, 31 bp, artificial sequence
  misc_feature: DNAzyme
tctgtgagggctagctacaacgagaccttat

SEQ ID NO: 6829 - DNA, 31 bp, artificial sequence
  misc_feature: DNAzyme
ccgctctgggctagctacaacgagagcgacc

SEQ ID NO: 6830 - DNA, 31 bp, artificial sequence
  misc_feature: DNAzyme
taaagccgggctagctacaacgatctgtgag

SEQ ID NO: 6831 - DNA, 31 bp, artificial sequence
  misc_feature: DNAzyme
atataaagggctagctacaacgacgctctgt

SEQ ID NO: 6832 - DNA, 31 bp, artificial sequence
  misc_feature: DNAzyme
ccccgataggctagctacaacgaaaagccgc

SEQ ID NO: 6833 - DNA, 31 bp, artificial sequence
  misc_feature: DNAzyme
acccccgaggctagctacaacgaataaagcc

SEQ ID NO: 6834 - DNA, 31 bp, artificial sequence
  misc_feature: DNAzyme
tcagaggaggctagctacaacgaccccgata

SEQ ID NO: 6835 - DNA, 31 bp, artificial sequence
  misc_feature: DNAzyme
tgaattagggctagctacaacgacagaggac

SEQ ID NO: 6836 - DNA, 31 bp, artificial sequence
  misc_feature: DNAzyme
cttttgaaggctagctacaacgatagtcaga

SEQ ID NO: 6837 - DNA, 31 bp, artificial sequence
  misc_feature: DNAzyme
cagttctgggctagctacaacgaccttttga

SEQ ID NO: 6838 - DNA, 31 bp, artificial sequence
  misc_feature: DNAzyme
aaccgcagggctagctacaacgatctgccct

SEQ ID NO: 6839 - DNA, 31 bp, artificial sequence
  misc_feature: DNAzyme
gataaccgggctagctacaacgaagttctgc

SEQ ID NO: 6840 - DNA, 31 bp, artificial sequence
  misc_feature: DNAzyme
ggcgataaggctagctacaacgacgcagttc

SEQ ID NO: 6841 - DNA, 31 bp, artificial sequence
  misc_feature: DNAzyme
accggcgaggctagctacaacgaaaccgcag

SEQ ID NO: 6842 - DNA, 31 bp, artificial sequence
  misc_feature: DNAzyme
ggcaccggggctagctacaacgagataaccg

SEQ ID NO: 6843 - DNA, 31 bp, artificial sequence
  misc_feature: DNAzyme
gcgcggcaggctagctacaacgacggcgata

SEQ ID NO: 6844 - DNA, 31 bp, artificial sequence
  misc_feature: DNAzyme
tcgcgcggggctagctacaacgaaccggcga

SEQ ID NO: 6845 - DNA, 31 bp, artificial sequence
  misc_feature: DNAzyme
cgctcgcgggctagctacaacgaggcaccgg

SEQ ID NO: 6846 - DNA, 31 bp, artificial sequence
  misc_feature: DNAzyme
gccgctcgggctagctacaacgagcggcacc

SEQ ID NO: 6847 - DNA, 31 bp, artificial sequence
  misc_feature: DNAzyme
gcacgccgggctagctacaacgatcgcgcgg

SEQ ID NO: 6848 - DNA, 31 bp, artificial sequence
  misc_feature: DNAzyme
tcagcacgggctagctacaacgacgctcgcg

SEQ ID NO: 6849 - DNA, 31 bp, artificial sequence
  misc_feature: DNAzyme
cgtcagcaggctagctacaacgagccgctcg

SEQ ID NO: 6850 - DNA, 31 bp, artificial sequence
  misc_feature: DNAzyme
gtcgtcagggctagctacaacgaacgccgct

SEQ ID NO: 6851 - DNA, 31 bp, artificial sequence
  misc_feature: DNAzyme
gctggtcgggctagctacaacgacagcacgc

SEQ ID NO: 6852 - DNA, 31 bp, artificial sequence
  misc_feature: DNAzyme
acagctggggctagctacaacgacgtcagca

SEQ ID NO: 6853 - DNA, 31 bp, artificial sequence
  misc_feature: DNAzyme
taccacagggctagctacaacgatggtcgtc

SEQ ID NO: 6854 - DNA, 31 bp, artificial sequence
  misc_feature: DNAzyme
tattaccaggctagctacaacgaagctggtc

SEQ ID NO: 6855 - DNA, 31 bp, artificial sequence
  misc_feature: DNAzyme
gggtattaggctagctacaacgacacagctg

SEQ ID NO: 6856 - DNA, 31 bp, artificial sequence
  misc_feature: DNAzyme
tgagggtaggctagctacaacgataccacag

SEQ ID NO: 6857 - DNA, 31 bp, artificial sequence
  misc_feature: DNAzyme
tgtgagggggctagctacaacgaattaccac

SEQ ID NO: 6858 - DNA, 31 bp, artificial sequence
  misc_feature: DNAzyme
gtaacatgggctagctacaacgagagggtat

SEQ ID NO: 6859 - DNA, 31 bp, artificial sequence
  misc_feature: DNAzyme
aagtaacaggctagctacaacgagtgagggt

SEQ ID NO: 6860 - DNA, 31 bp, artificial sequence
  misc_feature: DNAzyme
tcaagtaaggctagctacaacgaatgtgagg

SEQ ID NO: 6861 - DNA, 31 bp, artificial sequence
  misc_feature: DNAzyme
ctttcaagggctagctacaacgaaacatgtg

SEQ ID NO: 6862 - DNA, 31 bp, artificial sequence
  misc_feature: DNAzyme
cgcagaggggctagctacaacgatttcaagt

SEQ ID NO: 6863 - DNA, 31 bp, artificial sequence
  misc_feature: DNAzyme
acaggccgggctagctacaacgaagaggctt

SEQ ID NO: 6864 - DNA, 31 bp, artificial sequence
  misc_feature: DNAzyme
tcgacaggggctagctacaacgacgcagagg

SEQ ID NO: 6865 - DNA, 31 bp, artificial sequence
  misc_feature: DNAzyme
cagctcgaggctagctacaacgaaggccgca

SEQ ID NO: 6866 - DNA, 31 bp, artificial sequence
  misc_feature: DNAzyme
cttcgcagggctagctacaacgatcgacagg

SEQ ID NO: 6867 - DNA, 31 bp, artificial sequence
  misc_feature: DNAzyme
gagcttcgggctagctacaacgaagctcgac

SEQ ID NO: 6868 - DNA, 31 bp, artificial sequence
  misc_feature: DNAzyme
tcctggagggctagctacaacgattcgcagc

SEQ ID NO: 6869 - DNA, 31 bp, artificial sequence
  misc_feature: DNAzyme
tcgtgcagggctagctacaacgacctggagc

SEQ ID NO: 6870 - DNA, 31 bp, artificial sequence
  misc_feature: DNAzyme
gcatcgtgggctagctacaacgaagtcctgg

SEQ ID NO: 6871 - DNA, 31 bp, artificial sequence
  misc_feature: DNAzyme
gagcatcgggctagctacaacgagcagtcct

SEQ ID NO: 6872 - DNA, 31 bp, artificial sequence
  misc_feature: DNAzyme
cacgagcaggctagctacaacgacgtgcagt

SEQ ID NO: 6873 - DNA, 31 bp, artificial sequence
  misc_feature: DNAzyme
cacacgagggctagctacaacgaatcgtgca

SEQ ID NO: 6874 - DNA, 31 bp, artificial sequence
  misc_feature: DNAzyme
tccacacaggctagctacaacgagagcatcg

SEQ ID NO: 6875 - DNA, 31 bp, artificial sequence
  misc_feature: DNAzyme
tctccacaggctagctacaacgaacgagcat

SEQ ID NO: 6876 - DNA, 31 bp, artificial sequence
  misc_feature: DNAzyme
cgtctccaggctagctacaacgaacacgagc

SEQ ID NO: 6877 - DNA, 31 bp, artificial sequence
  misc_feature: DNAzyme
ccaggtcgggctagctacaacgactccacac

SEQ ID NO: 6878 - DNA, 31 bp, artificial sequence
  misc_feature: DNAzyme
cgaccaggggctagctacaacgacgtctcca

SEQ ID NO: 6879 - DNA, 31 bp, artificial sequence
  misc_feature: DNAzyme
gataacgaggctagctacaacgacaggtcgt

SEQ ID NO: 6880 - DNA, 31 bp, artificial sequence
  misc_feature: DNAzyme
acagataaggctagctacaacgagaccaggt

SEQ ID NO: 6881 - DNA, 31 bp, artificial sequence
  misc_feature: DNAzyme
ttcacagaggctagctacaacgaaacgacca

SEQ ID NO: 6882 - DNA, 31 bp, artificial sequence
  misc_feature: DNAzyme
cactttcaggctagctacaacgaagataacg

SEQ ID NO: 6883 - DNA, 31 bp, artificial sequence
  misc_feature: DNAzyme
tccccgcaggctagctacaacgatttcacag

SEQ ID NO: 6884 - DNA, 31 bp, artificial sequence
  misc_feature: DNAzyme
ggtccccgggctagctacaacgaactttcac

SEQ ID NO: 6885 - DNA, 31 bp, artificial sequence
  misc_feature: DNAzyme
ctcttgggggctagctacaacgaccccgcac

SEQ ID NO: 6886 - DNA, 31 bp, artificial sequence
  misc_feature: DNAzyme
tcgccgcgggctagctacaacgacctcttgg

SEQ ID NO: 6887 - DNA, 31 bp, artificial sequence
  misc_feature: DNAzyme
gctcgccgggctagctacaacgagtcctctt

SEQ ID NO: 6888 - DNA, 31 bp, artificial sequence
  misc_feature: DNAzyme
taggctcgggctagctacaacgacgcgtcct

SEQ ID NO: 6889 - DNA, 31 bp, artificial sequence
  misc_feature: DNAzyme
ctcgtaggggctagctacaacgatcgccgcg

SEQ ID NO: 6890 - DNA, 31 bp, artificial sequence
  misc_feature: DNAzyme
aagactcgggctagctacaacgaaggctcgc

SEQ ID NO: 6891 - DNA, 31 bp, artificial sequence
  misc_feature: DNAzyme
cgtgaagaggctagctacaacgatcgtaggc

SEQ ID NO: 6892 - DNA, 31 bp, artificial sequence
  misc_feature: DNAzyme
agcctccgggctagctacaacgagaagactc

SEQ ID NO: 6893 - DNA, 31 bp, artificial sequence
  misc_feature: DNAzyme
agtcatagggctagctacaacgactccgtga

SEQ ID NO: 6894 - DNA, 31 bp, artificial sequence
  misc_feature: DNAzyme
cctagtcaggctagctacaacgaagcctccg

SEQ ID NO: 6895 - DNA, 31 bp, artificial sequence
  misc_feature: DNAzyme
gtacctagggctagctacaacgacatagcct

SEQ ID NO: 6896 - DNA, 31 bp, artificial sequence
  misc_feature: DNAzyme
gcagagtaggctagctacaacgactagtcat

SEQ ID NO: 6897 - DNA, 31 bp, artificial sequence
  misc_feature: DNAzyme
gggcagagggctagctacaacgaacctagtc

SEQ ID NO: 6898 - DNA, 31 bp, artificial sequence
  misc_feature: DNAzyme
ggggggggggctagctacaacgaagagtacc

SEQ ID NO: 6899 - DNA, 31 bp, artificial sequence
  misc_feature: DNAzyme
ggggcgggggctagctacaacgaccccgggg

SEQ ID NO: 6900 - DNA, 31 bp, artificial sequence
  misc_feature: DNAzyme
ggttggggggctagctacaacgagggtcccc

SEQ ID NO: 6901 - DNA, 31 bp, artificial sequence
  misc_feature: DNAzyme
tattccggggctagctacaacgatggggcgg

SEQ ID NO: 6902 - DNA, 31 bp, artificial sequence
  misc_feature: DNAzyme
aagtcgtaggctagctacaacgatccggttg

SEQ ID NO: 6903 - DNA, 31 bp, artificial sequence
  misc_feature: DNAzyme
ccaagtcgggctagctacaacgaattccggt

SEQ ID NO: 6904 - DNA, 31 bp, artificial sequence
  misc_feature: DNAzyme
actccaagggctagctacaacgacgtattcc

SEQ ID NO: 6905 - DNA, 31 bp, artificial sequence
  misc_feature: DNAzyme
gttatcaaggctagctacaacgatccaagtc

SEQ ID NO: 6906 - DNA, 31 bp, artificial sequence
  misc_feature: DNAzyme
tgatgttaggctagctacaacgacaactcca

SEQ ID NO: 6907 - DNA, 31 bp, artificial sequence
  misc_feature: DNAzyme
gcatgatgggctagctacaacgatatcaact

SEQ ID NO: 6908 - DNA, 31 bp, artificial sequence
  misc_feature: DNAzyme
gagcatgaggctagctacaacgagttatcaa

SEQ ID NO: 6909 - DNA, 31 bp, artificial sequence
  misc_feature: DNAzyme
gaggagcaggctagctacaacgagatgttat

SEQ ID NO: 6910 - DNA, 31 bp, artificial sequence
  misc_feature: DNAzyme
tggaggagggctagctacaacgaatgatgtt

SEQ ID NO: 6911 - DNA, 31 bp, artificial sequence
  misc_feature: DNAzyme
ctgatacgggctagctacaacgatggaggag

SEQ ID NO: 6912 - DNA, 31 bp, artificial sequence
  misc_feature: DNAzyme
aactgataggctagctacaacgagttggagg

SEQ ID NO: 6913 - DNA, 31 bp, artificial sequence
  misc_feature: DNAzyme
gcaactgaggctagctacaacgaacgttgga

SEQ ID NO: 6914 - DNA, 31 bp, artificial sequence
  misc_feature: DNAzyme
gtgtgcaaggctagctacaacgatgatacgt

SEQ ID NO: 6915 - DNA, 31 bp, artificial sequence
  misc_feature: DNAzyme
atcgtgtgggctagctacaacgaaactgata

SEQ ID NO: 6916 - DNA, 31 bp, artificial sequence
  misc_feature: DNAzyme
gcatcgtgggctagctacaacgagcaactga

SEQ ID NO: 6917 - DNA, 31 bp, artificial sequence
  misc_feature: DNAzyme
atgcatcgggctagctacaacgagtgcaact

SEQ ID NO: 6918 - DNA, 31 bp, artificial sequence
  misc_feature: DNAzyme
cagatgcaggctagctacaacgacgtgtgca

SEQ ID NO: 6919 - DNA, 31 bp, artificial sequence
  misc_feature: DNAzyme
gccagatgggctagctacaacgaatcgtgtg

SEQ ID NO: 6920 - DNA, 31 bp, artificial sequence
  misc_feature: DNAzyme
ttgccagaggctagctacaacgagcatcgtg

SEQ ID NO: 6921 - DNA, 31 bp, artificial sequence
  misc_feature: DNAzyme
cccttttgggctagctacaacgacagatgca

SEQ ID NO: 6922 - DNA, 31 bp, artificial sequence
  misc_feature: DNAzyme
gtagtacaggctagctacaacgaccttttgc

SEQ ID NO: 6923 - DNA, 31 bp, artificial sequence
  misc_feature: DNAzyme
aggtagtaggctagctacaacgaaccctttt

SEQ ID NO: 6924 - DNA, 31 bp, artificial sequence
  misc_feature: DNAzyme
tgaggtagggctagctacaacgaacaccctt

SEQ ID NO: 6925 - DNA, 31 bp, artificial sequence
  misc_feature: DNAzyme
gggtgaggggctagctacaacgaagtacacc

SEQ ID NO: 6926 - DNA, 31 bp, artificial sequence
  misc_feature: DNAzyme
gtcacgggggctagctacaacgagaggtagt

SEQ ID NO: 6927 - DNA, 31 bp, artificial sequence
  misc_feature: DNAzyme
tggggtcaggctagctacaacgagggtgagg

SEQ ID NO: 6928 - DNA, 31 bp, artificial sequence
  misc_feature: DNAzyme
tggtggggggctagctacaacgacacgggtg

SEQ ID NO: 6929 - DNA, 31 bp, artificial sequence
  misc_feature: DNAzyme
gggggtggggctagctacaacgaggggtcac

SEQ ID NO: 6930 - DNA, 31 bp, artificial sequence
  misc_feature: DNAzyme
aaggggggggctagctacaacgaggtggggt

SEQ ID NO: 6931 - DNA, 31 bp, artificial sequence
  misc_feature: DNAzyme
agcccgcgggctagctacaacgaaagggggg

SEQ ID NO: 6932 - DNA, 31 bp, artificial sequence
  misc_feature: DNAzyme
gcagcccgggctagctacaacgagcaagggg

SEQ ID NO: 6933 - DNA, 31 bp, artificial sequence
  misc_feature: DNAzyme
ccacgcagggctagctacaacgaccgcgcaa

SEQ ID NO: 6934 - DNA, 31 bp, artificial sequence
  misc_feature: DNAzyme
ctcccacgggctagctacaacgaagcccgcg

SEQ ID NO: 6935 - DNA, 31 bp, artificial sequence
  misc_feature: DNAzyme
gtctcccaggctagctacaacgagcagcccg

SEQ ID NO: 6936 - DNA, 31 bp, artificial sequence
  misc_feature: DNAzyme
tctagctgggctagctacaacgactcccacg

SEQ ID NO: 6937 - DNA, 31 bp, artificial sequence
  misc_feature: DNAzyme
gcttctagggctagctacaacgatgtctccc

SEQ ID NO: 6938 - DNA, 31 bp, artificial sequence
  misc_feature: DNAzyme
ctggagtgggctagctacaacgattctagct

SEQ ID NO: 6939 - DNA, 31 bp, artificial sequence
  misc_feature: DNAzyme
gactggagggctagctacaacgagcttctag

SEQ ID NO: 6940 - DNA, 31 bp, artificial sequence
  misc_feature: DNAzyme
ggagttgaggctagctacaacgatggagtgc

SEQ ID NO: 6941 - DNA, 31 bp, artificial sequence
  misc_feature: DNAzyme
gccaggagggctagctacaacgatgactgga

SEQ ID NO: 6942 - DNA, 31 bp, artificial sequence
  misc_feature: DNAzyme
ttgcctagggctagctacaacgacaggagtt

SEQ ID NO: 6943 - DNA, 31 bp, artificial sequence
  misc_feature: DNAzyme
tgatgttgggctagctacaacgactagccag

SEQ ID NO: 6944 - DNA, 31 bp, artificial sequence
  misc_feature: DNAzyme
tgatgatgggctagctacaacgatgcctagc

SEQ ID NO: 6945 - DNA, 31 bp, artificial sequence
  misc_feature: DNAzyme
catgatgaggctagctacaacgagttgccta

SEQ ID NO: 6946 - DNA, 31 bp, artificial sequence
  misc_feature: DNAzyme
aaacatgaggctagctacaacgagatgttgc

SEQ ID NO: 6947 - DNA, 31 bp, artificial sequence
  misc_feature: DNAzyme
tgcaaacaggctagctacaacgagatgatgt

SEQ ID NO: 6948 - DNA, 31 bp, artificial sequence
  misc_feature: DNAzyme
ggtgcaaaggctagctacaacgaatgatgat

SEQ ID NO: 6949 - DNA, 31 bp, artificial sequence
  misc_feature: DNAzyme
agtgggtgggctagctacaacgaaaacatga

SEQ ID NO: 6950 - DNA, 31 bp, artificial sequence
  misc_feature: DNAzyme
agagtgggggctagctacaacgagcaaacat

SEQ ID NO: 6951 - DNA, 31 bp, artificial sequence
  misc_feature: DNAzyme
ccatagagggctagctacaacgagggtgcaa

SEQ ID NO: 6952 - DNA, 31 bp, artificial sequence
  misc_feature: DNAzyme
cttacccaggctagctacaacgaagagtggg

SEQ ID NO: 6953 - DNA, 31 bp, artificial sequence
  misc_feature: DNAzyme
catccttaggctagctacaacgaccatagag

SEQ ID NO: 6954 - DNA, 31 bp, artificial sequence
  misc_feature: DNAzyme
cagaatcaggctagctacaacgaccttaccc

SEQ ID NO: 6955 - DNA, 31 bp, artificial sequence
  misc_feature: DNAzyme
catcagaaggctagctacaacgacatcctta

SEQ ID NO: 6956 - DNA, 31 bp, artificial sequence
  misc_feature: DNAzyme
gtgagtcaggctagctacaacgacagaatca

SEQ ID NO: 6957 - DNA, 31 bp, artificial sequence
  misc_feature: DNAzyme
gaagtgagggctagctacaacgacatcagaa

SEQ ID NO: 6958 - DNA, 31 bp, artificial sequence
  misc_feature: DNAzyme
agaagaagggctagctacaacgagagtcatc

SEQ ID NO: 6959 - DNA, 31 bp, artificial sequence
  misc_feature: DNAzyme
tagaaggaggctagctacaacgaggagaaga

SEQ ID NO: 6960 - DNA, 31 bp, artificial sequence
  misc_feature: DNAzyme
ctcctgggggctagctacaacgatagaagga

SEQ ID NO: 6961 - DNA, 31 bp, artificial sequence
  misc_feature: DNAzyme
tcaagttgggctagctacaacgatcctgggc

SEQ ID NO: 6962 - DNA, 31 bp, artificial sequence
  misc_feature: DNAzyme
ttctcaagggctagctacaacgatgctcctg

SEQ ID NO: 6963 - DNA, 31 bp, artificial sequence
  misc_feature: DNAzyme
gtctagggggctagctacaacgatttctcaa

SEQ ID NO: 6964 - DNA, 31 bp, artificial sequence
  misc_feature: DNAzyme
tctggcagggctagctacaacgactagggct

SEQ ID NO: 6965 - DNA, 31 bp, artificial sequence
  misc_feature: DNAzyme
agatctggggctagctacaacgaagtctagg

SEQ ID NO: 6966 - DNA, 31 bp, artificial sequence
  misc_feature: DNAzyme
cccgtagaggctagctacaacgactggcagt

SEQ ID NO: 6967 - DNA, 31 bp, artificial sequence
  misc_feature: DNAzyme
aagccccgggctagctacaacgaagatctgg

SEQ ID NO: 6968 - DNA, 31 bp, artificial sequence
  misc_feature: DNAzyme
gtaacaagggctagctacaacgacccgtaga

SEQ ID NO: 6969 - DNA, 31 bp, artificial sequence
  misc_feature: DNAzyme
tggagtaaggctagctacaacgaaagccccg

SEQ ID NO: 6970 - DNA, 31 bp, artificial sequence
  misc_feature: DNAzyme
caatggagggctagctacaacgaaacaagcc

SEQ ID NO: 6971 - DNA, 31 bp, artificial sequence
  misc_feature: DNAzyme
tggctcaaggctagctacaacgaggagtaac

SEQ ID NO: 6972 - DNA, 31 bp, artificial sequence
  misc_feature: DNAzyme
tcaagtggggctagctacaacgatcaatgga

SEQ ID NO: 6973 - DNA, 31 bp, artificial sequence
  misc_feature: DNAzyme
aggtcaagggctagctacaacgaggctcaat

SEQ ID NO: 6974 - DNA, 31 bp, artificial sequence
  misc_feature: DNAzyme
gaggtaggggctagctacaacgacaagtggc

SEQ ID NO: 6975 - DNA, 31 bp, artificial sequence
  misc_feature: DNAzyme
atctgaggggctagctacaacgaaggtcaag

SEQ ID NO: 6976 - DNA, 31 bp, artificial sequence
  misc_feature: DNAzyme
ctgaatgaggctagctacaacgactgaggta

SEQ ID NO: 6977 - DNA, 31 bp, artificial sequence
  misc_feature: DNAzyme
tcgctgaaggctagctacaacgagatctgag

SEQ ID NO: 6978 - DNA, 31 bp, artificial sequence
  misc_feature: DNAzyme
tggagtcgggctagctacaacgatgaatgat

SEQ ID NO: 6979 - DNA, 31 bp, artificial sequence
  misc_feature: DNAzyme
ccatggagggctagctacaacgacgctgaat

SEQ ID NO: 6980 - DNA, 31 bp, artificial sequence
  misc_feature: DNAzyme
taagaccaggctagctacaacgaggagtcgc

SEQ ID NO: 6981 - DNA, 31 bp, artificial sequence
  misc_feature: DNAzyme
cgctaagaggctagctacaacgacatggagt

SEQ ID NO: 6982 - DNA, 31 bp, artificial sequence
  misc_feature: DNAzyme
aaaatgcgggctagctacaacgataagacca

SEQ ID NO: 6983 - DNA, 31 bp, artificial sequence
  misc_feature: DNAzyme
tgaaaatgggctagctacaacgagctaagac

SEQ ID NO: 6984 - DNA, 31 bp, artificial sequence
  misc_feature: DNAzyme
agtgaaaaggctagctacaacgagcgctaag

SEQ ID NO: 6985 - DNA, 31 bp, artificial sequence
  misc_feature: DNAzyme
ctatggagggctagctacaacgagaaaatgc

SEQ ID NO: 6986 - DNA, 31 bp, artificial sequence
  misc_feature: DNAzyme
agtaactaggctagctacaacgaggagtgaa

SEQ ID NO: 6987 - DNA, 31 bp, artificial sequence
  misc_feature: DNAzyme
gggagtaaggctagctacaacgatatggagt

SEQ ID NO: 6988 - DNA, 31 bp, artificial sequence
  misc_feature: DNAzyme
ctggggagggctagctacaacgaaactatgg

SEQ ID NO: 6989 - DNA, 31 bp, artificial sequence
  misc_feature: DNAzyme
tgatttcaggctagctacaacgactggggag

SEQ ID NO: 6990 - DNA, 31 bp, artificial sequence
  misc_feature: DNAzyme
cctattgaggctagctacaacgattcacctg

SEQ ID NO: 6991 - DNA, 31 bp, artificial sequence
  misc_feature: DNAzyme
ccaccctaggctagctacaacgatgatttca

SEQ ID NO: 6992 - DNA, 31 bp, artificial sequence
  misc_feature: DNAzyme
tgatgccaggctagctacaacgacctattga

SEQ ID NO: 6993 - DNA, 31 bp, artificial sequence
  misc_feature: DNAzyme
gcatgatgggctagctacaacgacaccctat

SEQ ID NO: 6994 - DNA, 31 bp, artificial sequence
  misc_feature: DNAzyme
aggcatgaggctagctacaacgagccaccct

SEQ ID NO: 6995 - DNA, 31 bp, artificial sequence
  misc_feature: DNAzyme
ctgaggcaggctagctacaacgagatgccac

SEQ ID NO: 6996 - DNA, 31 bp, artificial sequence
  misc_feature: DNAzyme
tcctgaggggctagctacaacgaatgatgcc

SEQ ID NO: 6997 - DNA, 31 bp, artificial sequence
  misc_feature: DNAzyme
accccaagggctagctacaacgattcctgag

SEQ ID NO: 6998 - DNA, 31 bp, artificial sequence
  misc_feature: DNAzyme
gggtggtaggctagctacaacgacccaagtt

SEQ ID NO: 6999 - DNA, 31 bp, artificial sequence
  misc_feature: DNAzyme
aagggtggggctagctacaacgaaccccaag

SEQ ID NO: 7000 - DNA, 31 bp, artificial sequence
  misc_feature: DNAzyme
cgcaagggggctagctacaacgaggtacccc

SEQ ID NO: 7001 - DNA, 31 bp, artificial sequence
  misc_feature: DNAzyme
caggttcgggctagctacaacgaaagggtgg

SEQ ID NO: 7002 - DNA, 31 bp, artificial sequence
  misc_feature: DNAzyme
tctccaggggctagctacaacgatcgcaagg

SEQ ID NO: 7003 - DNA, 31 bp, artificial sequence
  misc_feature: DNAzyme
gcccgatgggctagctacaacgactccaggt

SEQ ID NO: 7004 - DNA, 31 bp, artificial sequence
  misc_feature: DNAzyme
tggcccgaggctagctacaacgagtctccag

SEQ ID NO: 7005 - DNA, 31 bp, artificial sequence
  misc_feature: DNAzyme
acttctggggctagctacaacgaccgatgtc

SEQ ID NO: 7006 - DNA, 31 bp, artificial sequence
  misc_feature: DNAzyme
cgcgaacaggctagctacaacgattctggcc

SEQ ID NO: 7007 - DNA, 31 bp, artificial sequence
  misc_feature: DNAzyme
agcgcgaaggctagctacaacgaacttctgg

SEQ ID NO: 7008 - DNA, 31 bp, artificial sequence
  misc_feature: DNAzyme
gcttagcgggctagctacaacgagaacactt

SEQ ID NO: 7009 - DNA, 31 bp, artificial sequence
  misc_feature: DNAzyme
tagcttagggctagctacaacgagcgaacac

SEQ ID NO: 7010 - DNA, 31 bp, artificial sequence
  misc_feature: DNAzyme
gacagtagggctagctacaacgattagcgcg

SEQ ID NO: 7011 - DNA, 31 bp, artificial sequence
  misc_feature: DNAzyme
tgggacagggctagctacaacgaagcttagc

SEQ ID NO: 7012 - DNA, 31 bp, artificial sequence
  misc_feature: DNAzyme
ccctgggaggctagctacaacgaagtagctt

SEQ ID NO: 7013 - DNA, 31 bp, artificial sequence
  misc_feature: DNAzyme
ggtggcggggctagctacaacgacctccccc

SEQ ID NO: 7014 - DNA, 31 bp, artificial sequence
  misc_feature: DNAzyme
acaggtggggctagctacaacgaggccctcc

SEQ ID NO: 7015 - DNA, 31 bp, artificial sequence
  misc_feature: DNAzyme
gccacaggggctagctacaacgaggcggccc

SEQ ID NO: 7016 - DNA, 31 bp, artificial sequence
  misc_feature: DNAzyme
acctgccaggctagctacaacgaaggtggcg

SEQ ID NO: 7017 - DNA, 31 bp, artificial sequence
  misc_feature: DNAzyme
ggtacctgggctagctacaacgacacaggtg

SEQ ID NO: 7018 - DNA, 31 bp, artificial sequence
  misc_feature: DNAzyme
aagaggtaggctagctacaacgactgccaca

SEQ ID NO: 7019 - DNA, 31 bp, artificial sequence
  misc_feature: DNAzyme
tgaagaggggctagctacaacgaacctgcca

SEQ ID NO: 7020 - DNA, 31 bp, artificial sequence
  misc_feature: DNAzyme
ctgcccagggctagctacaacgatgaagagg

SEQ ID NO: 7021 - DNA, 31 bp, artificial sequence
  misc_feature: DNAzyme
ctttactgggctagctacaacgaccagttga

SEQ ID NO: 7022 - DNA, 31 bp, artificial sequence
  misc_feature: DNAzyme
ggtctttaggctagctacaacgatgcccagt

SEQ ID NO: 7023 - DNA, 31 bp, artificial sequence
  misc_feature: DNAzyme
gagtttggggctagctacaacgactttactg

SEQ ID NO: 7024 - DNA, 31 bp, artificial sequence
  misc_feature: DNAzyme
agtttgagggctagctacaacgattggtctt

SEQ ID NO: 7025 - DNA, 31 bp, artificial sequence
  misc_feature: DNAzyme
ggagtgagggctagctacaacgattgagttt

SEQ ID NO: 7026 - DNA, 31 bp, artificial sequence
  misc_feature: DNAzyme
gattggagggctagctacaacgagagtttga

SEQ ID NO: 7027 - DNA, 31 bp, artificial sequence
  misc_feature: DNAzyme
agctgggaggctagctacaacgatggagtga

SEQ ID NO: 7028 - DNA, 31 bp, artificial sequence
  misc_feature: DNAzyme
agacgcagggctagctacaacgatgggattg

SEQ ID NO: 7029 - DNA, 31 bp, artificial sequence
  misc_feature: DNAzyme
ctgagacgggctagctacaacgaagctggga

SEQ ID NO: 7030 - DNA, 31 bp, artificial sequence
  misc_feature: DNAzyme
aactgagaggctagctacaacgagcagctgg

SEQ ID NO: 7031 - DNA, 31 bp, artificial sequence
  misc_feature: DNAzyme
aagtccaaggctagctacaacgatgagacgc

SEQ ID NO: 7032 - DNA, 31 bp, artificial sequence
  misc_feature: DNAzyme
tggacaagggctagctacaacgaccaactga

SEQ ID NO: 7033 - DNA, 31 bp, artificial sequence
  misc_feature: DNAzyme
cagttggaggctagctacaacgaaagtccaa

SEQ ID NO: 7034 - DNA, 31 bp, artificial sequence
  misc_feature: DNAzyme
cgaaccagggctagctacaacgatggacaag

SEQ ID NO: 7035 - DNA, 31 bp, artificial sequence
  misc_feature: DNAzyme
gcaacgaaggctagctacaacgacagttgga

SEQ ID NO: 7036 - DNA, 31 bp, artificial sequence
  misc_feature: DNAzyme
gccagcaaggctagctacaacgagaaccagt

SEQ ID NO: 7037 - DNA, 31 bp, artificial sequence
  misc_feature: DNAzyme
gtagccagggctagctacaacgaaacgaacc

SEQ ID NO: 7038 - DNA, 31 bp, artificial sequence
  misc_feature: DNAzyme
cgctgtagggctagctacaacgacagcaacg

SEQ ID NO: 7039 - DNA, 31 bp, artificial sequence
  misc_feature: DNAzyme
ccccgctgggctagctacaacgaagccagca

SEQ ID NO: 7040 - DNA, 31 bp, artificial sequence
  misc_feature: DNAzyme
ctcccccgggctagctacaacgatgtagcca

SEQ ID NO: 7041 - DNA, 31 bp, artificial sequence
  misc_feature: DNAzyme
gatacacgggctagctacaacgactcccccg

SEQ ID NO: 7042 - DNA, 31 bp, artificial sequence
  misc_feature: DNAzyme
gtgatacaggctagctacaacgagtctcccc

SEQ ID NO: 7043 - DNA, 31 bp, artificial sequence
  misc_feature: DNAzyme
ctgtgataggctagctacaacgaacgtctcc

SEQ ID NO: 7044 - DNA, 31 bp, artificial sequence
  misc_feature: DNAzyme
ggctgtgaggctagctacaacgaacacgtct

SEQ ID NO: 7045 - DNA, 31 bp, artificial sequence
  misc_feature: DNAzyme
acaggctgggctagctacaacgagatacacg

SEQ ID NO: 7046 - DNA, 31 bp, artificial sequence
  misc_feature: DNAzyme
gagacaggggctagctacaacgatgtgatac

SEQ ID NO: 7047 - DNA, 31 bp, artificial sequence
  misc_feature: DNAzyme
gcacgagaggctagctacaacgaaggctgtg

SEQ ID NO: 7048 - DNA, 31 bp, artificial sequence
  misc_feature: DNAzyme
gtcgggcaggctagctacaacgagagacagg

SEQ ID NO: 7049 - DNA, 31 bp, artificial sequence
  misc_feature: DNAzyme
gggtcgggggctagctacaacgaacgagaca

SEQ ID NO: 7050 - DNA, 31 bp, artificial sequence
  misc_feature: DNAzyme
cagcggggggctagctacaacgacgggcacg

SEQ ID NO: 7051 - DNA, 31 bp, artificial sequence
  misc_feature: DNAzyme
tgaaccagggctagctacaacgaggggtcgg

SEQ ID NO: 7052 - DNA, 31 bp, artificial sequence
  misc_feature: DNAzyme
agcatgaaggctagctacaacgacagcgggg

SEQ ID NO: 7053 - DNA, 31 bp, artificial sequence
  misc_feature: DNAzyme
gcaaagcaggctagctacaacgagaaccagc

SEQ ID NO: 7054 - DNA, 31 bp, artificial sequence
  misc_feature: DNAzyme
aggcaaagggctagctacaacgaatgaacca

SEQ ID NO: 7055 - DNA, 31 bp, artificial sequence
  misc_feature: DNAzyme
ggagtaggggctagctacaacgaaaagcatg

SEQ ID NO: 7056 - DNA, 31 bp, artificial sequence
  misc_feature: DNAzyme
agtaggagggctagctacaacgaaggcaaag

SEQ ID NO: 7057 - DNA, 31 bp, artificial sequence
  misc_feature: DNAzyme
acggagagggctagctacaacgaaggagtag

SEQ ID NO: 7058 - DNA, 31 bp, artificial sequence
  misc_feature: DNAzyme
tacccctaggctagctacaacgaggagagta

SEQ ID NO: 7059 - DNA, 31 bp, artificial sequence
  misc_feature: DNAzyme
gatgcctaggctagctacaacgaccctacgg

SEQ ID NO: 7060 - DNA, 31 bp, artificial sequence
  misc_feature: DNAzyme
ggtagatgggctagctacaacgactacccct

SEQ ID NO: 7061 - DNA, 31 bp, artificial sequence
  misc_feature: DNAzyme
caggtagaggctagctacaacgagcctaccc

SEQ ID NO: 7062 - DNA, 31 bp, artificial sequence
  misc_feature: DNAzyme
ggagcaggggctagctacaacgaagatgcct

SEQ ID NO: 7063 - DNA, 31 bp, artificial sequence
  misc_feature: DNAzyme
ttggggagggctagctacaacgaaggtagat

SEQ ID NO: 7064 - DNA, 31 bp, artificial sequence
  misc_feature: DNAzyme
ttcatcggggctagctacaacgatggggagc

SEQ ID NO: 7065 - DNA, 31 bp, artificial sequence
  misc_feature: DNAzyme
cctgttcaggctagctacaacgacggttggg

SEQ ID NO: 7066 - DNA, 31 bp, artificial sequence
  misc_feature: DNAzyme
gctccctgggctagctacaacgatcatcggt

SEQ ID NO: 7067 - DNA, 31 bp, artificial sequence
  misc_feature: DNAzyme
gtgtttagggctagctacaacgatccctgtt

SEQ ID NO: 7068 - DNA, 31 bp, artificial sequence
  misc_feature: DNAzyme
ctggagtgggctagctacaacgattagctcc

SEQ ID NO: 7069 - DNA, 31 bp, artificial sequence
  misc_feature: DNAzyme
gcctggagggctagctacaacgagtttagct

SEQ ID NO: 7070 - DNA, 31 bp, artificial sequence
  misc_feature: DNAzyme
cctattggggctagctacaacgactggagtg

SEQ ID NO: 7071 - DNA, 31 bp, artificial sequence
  misc_feature: DNAzyme
atggcctaggctagctacaacgatggcctgg

SEQ ID NO: 7072 - DNA, 31 bp, artificial sequence
  misc_feature: DNAzyme
cgggatggggctagctacaacgactattggc

SEQ ID NO: 7073 - DNA, 31 bp, artificial sequence
  misc_feature: DNAzyme
aaacgggaggctagctacaacgaggcctatt

SEQ ID NO: 7074 - DNA, 31 bp, artificial sequence
  misc_feature: DNAzyme
aaaaaaaaggctagctacaacgagggatggc

SEQ ID NO: 7075 - DNA, 31 bp, artificial sequence
  misc_feature: DNAzyme
ccatcccgggctagctacaacgatttttttt

SEQ ID NO: 7076 - DNA, 31 bp, artificial sequence
  misc_feature: DNAzyme
ataggccaggctagctacaacgacccgtttt

SEQ ID NO: 7077 - DNA, 31 bp, artificial sequence
  misc_feature: DNAzyme
ccaataggggctagctacaacgacatcccgt

SEQ ID NO: 7078 - DNA, 31 bp, artificial sequence
  misc_feature: DNAzyme
caggccaaggctagctacaacgaaggccatc

SEQ ID NO: 7079 - DNA, 31 bp, artificial sequence
  misc_feature: DNAzyme
actccaggggctagctacaacgacaataggc

SEQ ID NO: 7080 - DNA, 31 bp, artificial sequence
  misc_feature: DNAzyme
gctaaacaggctagctacaacgatccaggcc

SEQ ID NO: 7081 - DNA, 31 bp, artificial sequence
  misc_feature: DNAzyme
gagctaaaggctagctacaacgaactccagg

SEQ ID NO: 7082 - DNA, 31 bp, artificial sequence
  misc_feature: DNAzyme
acagggagggctagctacaacgataaacact

SEQ ID NO: 7083 - DNA, 31 bp, artificial sequence
  misc_feature: DNAzyme
ccgatgaaggctagctacaacgaagggagct

SEQ ID NO: 7084 - DNA, 31 bp, artificial sequence
  misc_feature: DNAzyme
ccaaccgaggctagctacaacgagaacaggg

SEQ ID NO: 7085 - DNA, 31 bp, artificial sequence
  misc_feature: DNAzyme
ctccccaaggctagctacaacgacgatgaac

SEQ ID NO: 7086 - DNA, 31 bp, artificial sequence
  misc_feature: DNAzyme
tctacctgggctagctacaacgatccccaac

SEQ ID NO: 7087 - DNA, 31 bp, artificial sequence
  misc_feature: DNAzyme
ggcatctaggctagctacaacgactgctccc

SEQ ID NO: 7088 - DNA, 31 bp, artificial sequence
  misc_feature: DNAzyme
ggtaggcaggctagctacaacgactacctgc

SEQ ID NO: 7089 - DNA, 31 bp, artificial sequence
  misc_feature: DNAzyme
ggggtaggggctagctacaacgaatctacct

SEQ ID NO: 7090 - DNA, 31 bp, artificial sequence
  misc_feature: DNAzyme
cgtaggggggctagctacaacgaaggcatct

SEQ ID NO: 7091 - DNA, 31 bp, artificial sequence
  misc_feature: DNAzyme
actctccgggctagctacaacgaaggggtag

SEQ ID NO: 7092 - DNA, 31 bp, artificial sequence
  misc_feature: DNAzyme
tactcctaggctagctacaacgatctccgta

SEQ ID NO: 7093 - DNA, 31 bp, artificial sequence
  misc_feature: DNAzyme
tttgcctaggctagctacaacgatcctactc

SEQ ID NO: 7094 - DNA, 31 bp, artificial sequence
  misc_feature: DNAzyme
atgctttgggctagctacaacgactactcct

SEQ ID NO: 7095 - DNA, 31 bp, artificial sequence
  misc_feature: DNAzyme
ggttcatgggctagctacaacgatttgccta

SEQ ID NO: 7096 - DNA, 31 bp, artificial sequence
  misc_feature: DNAzyme
ctggttcaggctagctacaacgagctttgcc

SEQ ID NO: 7097 - DNA, 31 bp, artificial sequence
  misc_feature: DNAzyme
cccgctggggctagctacaacgatcatgctt

SEQ ID NO: 7098 - DNA, 31 bp, artificial sequence
  misc_feature: DNAzyme
cgaccccgggctagctacaacgatggttcat

SEQ ID NO: 7099 - DNA, 31 bp, artificial sequence
  misc_feature: DNAzyme
gtgcccgaggctagctacaacgacccgctgg

SEQ ID NO: 7100 - DNA, 31 bp, artificial sequence
  misc_feature: DNAzyme
gtctcgtgggctagctacaacgaccgacccc

SEQ ID NO: 7101 - DNA, 31 bp, artificial sequence
  misc_feature: DNAzyme
ctgtctcgggctagctacaacgagcccgacc

SEQ ID NO: 7102 - DNA, 31 bp, artificial sequence
  misc_feature: DNAzyme
acagcctgggctagctacaacgactcgtgcc

SEQ ID NO: 7103 - DNA, 31 bp, artificial sequence
  misc_feature: DNAzyme
tatcacagggctagctacaacgactgtctcg

SEQ ID NO: 7104 - DNA, 31 bp, artificial sequence
  misc_feature: DNAzyme
gtgtatcaggctagctacaacgaagcctgtc

SEQ ID NO: 7105 - DNA, 31 bp, artificial sequence
  misc_feature: DNAzyme
gacgtgtaggctagctacaacgacacagcct

SEQ ID NO: 7106 - DNA, 31 bp, artificial sequence
  misc_feature: DNAzyme
gagacgtgggctagctacaacgaatcacagc

SEQ ID NO: 7107 - DNA, 31 bp, artificial sequence
  misc_feature: DNAzyme
gggagacgggctagctacaacgagtatcaca

SEQ ID NO: 7108 - DNA, 31 bp, artificial sequence
  misc_feature: DNAzyme
gggggagaggctagctacaacgagtgtatca

SEQ ID NO: 7109 - DNA, 31 bp, artificial sequence
  misc_feature: DNAzyme
ggctacagggctagctacaacgagggggaga

SEQ ID NO: 7110 - DNA, 31 bp, artificial sequence
  misc_feature: DNAzyme
gctggctaggctagctacaacgaagcggggg

SEQ ID NO: 7111 - DNA, 31 bp, artificial sequence
  misc_feature: DNAzyme
gttgctggggctagctacaacgatacagcgg

SEQ ID NO: 7112 - DNA, 31 bp, artificial sequence
  misc_feature: DNAzyme
gttcgttgggctagctacaacgatggctaca

SEQ ID NO: 7113 - DNA, 31 bp, artificial sequence
  misc_feature: DNAzyme
ctggttcgggctagctacaacgatgctggct

SEQ ID NO: 7114 - DNA, 31 bp, artificial sequence
  misc_feature: DNAzyme
ccaactggggctagctacaacgatcgttgct

SEQ ID NO: 7115 - DNA, 31 bp, artificial sequence
  misc_feature: DNAzyme
ttgtccaaggctagctacaacgatggttcgt

SEQ ID NO: 7116 - DNA, 31 bp, artificial sequence
  misc_feature: DNAzyme
tggacttgggctagctacaacgaccaactgg

SEQ ID NO: 7117 - DNA, 31 bp, artificial sequence
  misc_feature: DNAzyme
cagttggaggctagctacaacgattgtccaa

SEQ ID NO: 7118 - DNA, 31 bp, artificial sequence
  misc_feature: DNAzyme
cgtctcagggctagctacaacgatggacttg

SEQ ID NO: 7119 - DNA, 31 bp, artificial sequence
  misc_feature: DNAzyme
cagctgcgggctagctacaacgactcagttg

SEQ ID NO: 7120 - DNA, 31 bp, artificial sequence
  misc_feature: DNAzyme
cccagctgggctagctacaacgagtctcagt

SEQ ID NO: 7121 - DNA, 31 bp, artificial sequence
  misc_feature: DNAzyme
aatcccagggctagctacaacgatgcgtctc

SEQ ID NO: 7122 - DNA, 31 bp, artificial sequence
  misc_feature: DNAzyme
cactccaaggctagctacaacgacccagctg

SEQ ID NO: 7123 - DNA, 31 bp, artificial sequence
  misc_feature: DNAzyme
caaactcaggctagctacaacgatccaatcc

SEQ ID NO: 7124 - DNA, 31 bp, artificial sequence
  misc_feature: DNAzyme
aactcaaaggctagctacaacgatcactcca

SEQ ID NO: 7125 - DNA, 31 bp, artificial sequence
  misc_feature: DNAzyme
agaccaaaggctagctacaacgatcaaactc

SEQ ID NO: 7126 - DNA, 31 bp, artificial sequence
  misc_feature: DNAzyme
agtaaagaggctagctacaacgacaaactca

SEQ ID NO: 7127 - DNA, 31 bp, artificial sequence
  misc_feature: DNAzyme
ctgggcagggctagctacaacgaaaagacca

SEQ ID NO: 7128 - DNA, 31 bp, artificial sequence
  misc_feature: DNAzyme
caactgggggctagctacaacgaagtaaaga

SEQ ID NO: 7129 - DNA, 31 bp, artificial sequence
  misc_feature: DNAzyme
ctcttcaaggctagctacaacgatgggcagt

SEQ ID NO: 7130 - DNA, 31 bp, artificial sequence
  misc_feature: DNAzyme
ggcaggtaggctagctacaacgactcttcaa

SEQ ID NO: 7131 - DNA, 31 bp, artificial sequence
  misc_feature: DNAzyme
gtggcaggggctagctacaacgaacctcttc

SEQ ID NO: 7132 - DNA, 31 bp, artificial sequence
  misc_feature: DNAzyme
acctgtggggctagctacaacgaaggtacct

SEQ ID NO: 7133 - DNA, 31 bp, artificial sequence
  misc_feature: DNAzyme
gccacctgggctagctacaacgaggcaggta

SEQ ID NO: 7134 - DNA, 31 bp, artificial sequence
  misc_feature: DNAzyme
ggccgccaggctagctacaacgactgtggca

SEQ ID NO: 7135 - DNA, 31 bp, artificial sequence
  misc_feature: DNAzyme
gagggccgggctagctacaacgacacctgtg

SEQ ID NO: 7136 - DNA, 31 bp, artificial sequence
  misc_feature: DNAzyme
ggggagggggctagctacaacgacgccacct

SEQ ID NO: 7137 - DNA, 31 bp, artificial sequence
  misc_feature: DNAzyme
agctactgggctagctacaacgacccagggg

SEQ ID NO: 7138 - DNA, 31 bp, artificial sequence
  misc_feature: DNAzyme
ctaagctaggctagctacaacgatgtcccag

SEQ ID NO: 7139 - DNA, 31 bp, artificial sequence
  misc_feature: DNAzyme
gcgctaagggctagctacaacgatactgtcc

SEQ ID NO: 7140 - DNA, 31 bp, artificial sequence
  misc_feature: DNAzyme
tgttcgcgggctagctacaacgataagctac

SEQ ID NO: 7141 - DNA, 31 bp, artificial sequence
  misc_feature: DNAzyme
agtgttcgggctagctacaacgagctaagct

SEQ ID NO: 7142 - DNA, 31 bp, artificial sequence
  misc_feature: DNAzyme
cagaagtgggctagctacaacgatcgcgcta

SEQ ID NO: 7143 - DNA, 31 bp, artificial sequence
  misc_feature: DNAzyme
gccagaagggctagctacaacgagttcgcgc

SEQ ID NO: 7144 - DNA, 31 bp, artificial sequence
  misc_feature: DNAzyme
acatcgggggctagctacaacgacagaagtg

SEQ ID NO: 7145 - DNA, 31 bp, artificial sequence
  misc_feature: DNAzyme
tggagacaggctagctacaacgacgggccag

SEQ ID NO: 7146 - DNA, 31 bp, artificial sequence
  misc_feature: DNAzyme
cctggagaggctagctacaacgaatcgggcc

SEQ ID NO: 7147 - DNA, 31 bp, artificial sequence
  misc_feature: DNAzyme
cttgcgaaggctagctacaacgactggagac

SEQ ID NO: 7148 - DNA, 31 bp, artificial sequence
  misc_feature: DNAzyme
cacccttgggctagctacaacgagaacctgg

SEQ ID NO: 7149 - DNA, 31 bp, artificial sequence
  misc_feature: DNAzyme
gggtaccaggctagctacaacgaccttgcga

SEQ ID NO: 7150 - DNA, 31 bp, artificial sequence
  misc_feature: DNAzyme
ttggggtaggctagctacaacgacacccttg

SEQ ID NO: 7151 - DNA, 31 bp, artificial sequence
  misc_feature: DNAzyme
acttggggggctagctacaacgaaccaccct

SEQ ID NO: 7152 - DNA, 31 bp, artificial sequence
  misc_feature: DNAzyme
tcaggaaaggctagctacaacgattggggta

SEQ ID NO: 7153 - DNA, 31 bp, artificial sequence
  misc_feature: DNAzyme
gcatcatgggctagctacaacgactcaggaa

SEQ ID NO: 7154 - DNA, 31 bp, artificial sequence
  misc_feature: DNAzyme
tggcatcaggctagctacaacgagcctcagg

SEQ ID NO: 7155 - DNA, 31 bp, artificial sequence
  misc_feature: DNAzyme
gggtggcaggctagctacaacgacatgcctc

SEQ ID NO: 7156 - DNA, 31 bp, artificial sequence
  misc_feature: DNAzyme
tagggtggggctagctacaacgaatcatgcc

SEQ ID NO: 7157 - DNA, 31 bp, artificial sequence
  misc_feature: DNAzyme
caatagggggctagctacaacgaggcatcat

SEQ ID NO: 7158 - DNA, 31 bp, artificial sequence
  misc_feature: DNAzyme
gaaatcaaggctagctacaacgaagggtggc

SEQ ID NO: 7159 - DNA, 31 bp, artificial sequence
  misc_feature: DNAzyme
aggtgaaaggctagctacaacgacaataggg

SEQ ID NO: 7160 - DNA, 31 bp, artificial sequence
  misc_feature: DNAzyme
tccccaggggctagctacaacgagaaatcaa

SEQ ID NO: 7161 - DNA, 31 bp, artificial sequence
  misc_feature: DNAzyme
catagttaggctagctacaacgatccccagg

SEQ ID NO: 7162 - DNA, 31 bp, artificial sequence
  misc_feature: DNAzyme
ctccatagggctagctacaacgatactcccc

SEQ ID NO: 7163 - DNA, 31 bp, artificial sequence
  misc_feature: DNAzyme
tcactccaggctagctacaacgaagttactc

SEQ ID NO: 7164 - DNA, 31 bp, artificial sequence
  misc_feature: DNAzyme
cattttcaggctagctacaacgatccatagt

SEQ ID NO: 7165 - DNA, 31 bp, artificial sequence
  misc_feature: DNAzyme
ttagcgcaggctagctacaacgatttcactc

SEQ ID NO: 7166 - DNA, 31 bp, artificial sequence
  misc_feature: DNAzyme
tcttagcgggctagctacaacgaattttcac

SEQ ID NO: 7167 - DNA, 31 bp, artificial sequence
  misc_feature: DNAzyme
ggtcttagggctagctacaacgagcattttc

SEQ ID NO: 7168 - DNA, 31 bp, artificial sequence
  misc_feature: DNAzyme
ctccatggggctagctacaacgacttagcgc

SEQ ID NO: 7169 - DNA, 31 bp, artificial sequence
  misc_feature: DNAzyme
cgactccaggctagctacaacgaggtcttag

SEQ ID NO: 7170 - DNA, 31 bp, artificial sequence
  misc_feature: DNAzyme
ttcagcgaggctagctacaacgatccatggt

SEQ ID NO: 7171 - DNA, 31 bp, artificial sequence
  misc_feature: DNAzyme
tcattcagggctagctacaacgagactccat

SEQ ID NO: 7172 - DNA, 31 bp, artificial sequence
  misc_feature: DNAzyme
tcagatcaggctagctacaacgatcagcgac

SEQ ID NO: 7173 - DNA, 31 bp, artificial sequence
  misc_feature: DNAzyme
acctcagaggctagctacaacgacattcagc

SEQ ID NO: 7174 - DNA, 31 bp, artificial sequence
  misc_feature: DNAzyme
ttgacctaggctagctacaacgactcagatc

SEQ ID NO: 7175 - DNA, 31 bp, artificial sequence
  misc_feature: DNAzyme
ccacttgaggctagctacaacgactacctca

SEQ ID NO: 7176 - DNA, 31 bp, artificial sequence
  misc_feature: DNAzyme
ttgagccaggctagctacaacgattgaccta

SEQ ID NO: 7177 - DNA, 31 bp, artificial sequence
  misc_feature: DNAzyme
ccattgagggctagctacaacgacacttgac

SEQ ID NO: 7178 - DNA, 31 bp, artificial sequence
  misc_feature: DNAzyme
ttactccaggctagctacaacgatgagccac

SEQ ID NO: 7179 - DNA, 31 bp, artificial sequence
  misc_feature: DNAzyme
gcttgttaggctagctacaacgatccattga

SEQ ID NO: 7180 - DNA, 31 bp, artificial sequence
  misc_feature: DNAzyme
ggggcttgggctagctacaacgatactccat

SEQ ID NO: 7181 - DNA, 31 bp, artificial sequence
  misc_feature: DNAzyme
ctacggggggctagctacaacgattgttact

SEQ ID NO: 7182 - DNA, 31 bp, artificial sequence
  misc_feature: DNAzyme
cagatctaggctagctacaacgaggggcttg

SEQ ID NO: 7183 - DNA, 31 bp, artificial sequence
  misc_feature: DNAzyme
ctgccagaggctagctacaacgactacgggg

SEQ ID NO: 7184 - DNA, 31 bp, artificial sequence
  misc_feature: DNAzyme
ctagactgggctagctacaacgacagatcta

SEQ ID NO: 7185 - DNA, 31 bp, artificial sequence
  misc_feature: DNAzyme
gccctagaggctagctacaacgatgccagat

SEQ ID NO: 7186 - DNA, 31 bp, artificial sequence
  misc_feature: DNAzyme
tgagaaagggctagctacaacgacctagact

SEQ ID NO: 7187 - DNA, 31 bp, artificial sequence
  misc_feature: DNAzyme
aggagcaaggctagctacaacgattgagaaa

SEQ ID NO: 7188 - DNA, 31 bp, artificial sequence
  misc_feature: DNAzyme
cccaggagggctagctacaacgaaacttgag

SEQ ID NO: 7189 - DNA, 31 bp, artificial sequence
  misc_feature: DNAzyme
ccttctagggctagctacaacgaccaggagc

SEQ ID NO: 7190 - DNA, 31 bp, artificial sequence
  misc_feature: DNAzyme
cttctccaggctagctacaacgaccttctag

SEQ ID NO: 7191 - DNA, 31 bp, artificial sequence
  misc_feature: DNAzyme
atgactcaggctagctacaacgattcttctc

SEQ ID NO: 7192 - DNA, 31 bp, artificial sequence
  misc_feature: DNAzyme
tctgatgaggctagctacaacgatcacttct

SEQ ID NO: 7193 - DNA, 31 bp, artificial sequence
  misc_feature: DNAzyme
gattctgaggctagctacaacgagactcact

SEQ ID NO: 7194 - DNA, 31 bp, artificial sequence
  misc_feature: DNAzyme
aaggatgaggctagctacaacgatctgatga

SEQ ID NO: 7195 - DNA, 31 bp, artificial sequence
  misc_feature: DNAzyme
ggtaaggaggctagctacaacgagattctga

SEQ ID NO: 7196 - DNA, 31 bp, artificial sequence
  misc_feature: DNAzyme
tctatgggggctagctacaacgaaaggatga

SEQ ID NO: 7197 - DNA, 31 bp, artificial sequence
  misc_feature: DNAzyme
ccactctaggctagctacaacgagggtaagg

SEQ ID NO: 7198 - DNA, 31 bp, artificial sequence
  misc_feature: DNAzyme
tgcacccaggctagctacaacgatctatggg

SEQ ID NO: 7199 - DNA, 31 bp, artificial sequence
  misc_feature: DNAzyme
tgtttgcaggctagctacaacgaccactcta

SEQ ID NO: 7200 - DNA, 31 bp, artificial sequence
  misc_feature: DNAzyme
catgtttgggctagctacaacgaacccactc

SEQ ID NO: 7201 - DNA, 31 bp, artificial sequence
  misc_feature: DNAzyme
tcatcatgggctagctacaacgattgcaccc

SEQ ID NO: 7202 - DNA, 31 bp, artificial sequence
  misc_feature: DNAzyme
catcatcaggctagctacaacgagtttgcac

SEQ ID NO: 7203 - DNA, 31 bp, artificial sequence
  misc_feature: DNAzyme
caacatcaggctagctacaacgacatgtttg

SEQ ID NO: 7204 - DNA, 31 bp, artificial sequence
  misc_feature: DNAzyme
aggcaacaggctagctacaacgacatcatgt

SEQ ID NO: 7205 - DNA, 31 bp, artificial sequence
  misc_feature: DNAzyme
ctaggcaaggctagctacaacgaatcatcat

SEQ ID NO: 7206 - DNA, 31 bp, artificial sequence
  misc_feature: DNAzyme
tggctaggggctagctacaacgaaacatcat

SEQ ID NO: 7207 - DNA, 31 bp, artificial sequence
  misc_feature: DNAzyme
actcctggggctagctacaacgataggcaac

SEQ ID NO: 7208 - DNA, 31 bp, artificial sequence
  misc_feature: DNAzyme
ccagtcaaggctagctacaacgatcctggct

SEQ ID NO: 7209 - DNA, 31 bp, artificial sequence
  misc_feature: DNAzyme
cactccagggctagctacaacgacaactcct

SEQ ID NO: 7210 - DNA, 31 bp, artificial sequence
  misc_feature: DNAzyme
tagaagcaggctagctacaacgatccagtca

SEQ ID NO: 7211 - DNA, 31 bp, artificial sequence
  misc_feature: DNAzyme
gctagaagggctagctacaacgaactccagt

SEQ ID NO: 7212 - DNA, 31 bp, artificial sequence
  misc_feature: DNAzyme
ggagacagggctagctacaacgatagaagca

SEQ ID NO: 7213 - DNA, 31 bp, artificial sequence
  misc_feature: DNAzyme
gtgggagaggctagctacaacgaagctagaa

SEQ ID NO: 7214 - DNA, 31 bp, artificial sequence
  misc_feature: DNAzyme
gggctgcgggctagctacaacgagggagaca

SEQ ID NO: 7215 - DNA, 31 bp, artificial sequence
  misc_feature: DNAzyme
gcgggctgggctagctacaacgagtgggaga

SEQ ID NO: 7216 - DNA, 31 bp, artificial sequence
  misc_feature: DNAzyme
tgcgcgggggctagctacaacgatgcgtggg

SEQ ID NO: 7217 - DNA, 31 bp, artificial sequence
  misc_feature: DNAzyme
cccttgcgggctagctacaacgagggctgcg

SEQ ID NO: 7218 - DNA, 31 bp, artificial sequence
  misc_feature: DNAzyme
cccccttgggctagctacaacgagcgggctg

SEQ ID NO: 7219 - DNA, 31 bp, artificial sequence
  misc_feature: DNAzyme
ccccaccaggctagctacaacgacccccttg

SEQ ID NO: 7220 - DNA, 31 bp, artificial sequence
  misc_feature: DNAzyme
tgaccccaggctagctacaacgacacccccc

SEQ ID NO: 7221 - DNA, 31 bp, artificial sequence
  misc_feature: DNAzyme
acccgtgaggctagctacaacgacccaccac

SEQ ID NO: 7222 - DNA, 31 bp, artificial sequence
  misc_feature: DNAzyme
ctcacccgggctagctacaacgagaccccac

SEQ ID NO: 7223 - DNA, 31 bp, artificial sequence
  misc_feature: DNAzyme
ctacctcaggctagctacaacgaccgtgacc

SEQ ID NO: 7224 - DNA, 31 bp, artificial sequence
  misc_feature: DNAzyme
gtgtactaggctagctacaacgactcacccg

SEQ ID NO: 7225 - DNA, 31 bp, artificial sequence
  misc_feature: DNAzyme
agggtgtaggctagctacaacgatacctcac

SEQ ID NO: 7226 - DNA, 31 bp, artificial sequence
  misc_feature: DNAzyme
aaagggtgggctagctacaacgaactacctc

SEQ ID NO: 7227 - DNA, 31 bp, artificial sequence
  misc_feature: DNAzyme
caaaagggggctagctacaacgagtactacc

SEQ ID NO: 7228 - DNA, 31 bp, artificial sequence
  misc_feature: DNAzyme
gcatctggggctagctacaacgaaaaagggt

SEQ ID NO: 7229 - DNA, 31 bp, artificial sequence
  misc_feature: DNAzyme
acgatgcaggctagctacaacgactggcaaa

SEQ ID NO: 7230 - DNA, 31 bp, artificial sequence
  misc_feature: DNAzyme
acacgatgggctagctacaacgaatctggca

SEQ ID NO: 7231 - DNA, 31 bp, artificial sequence
  misc_feature: DNAzyme
gcacacgaggctagctacaacgagcatctgg

SEQ ID NO: 7232 - DNA, 31 bp, artificial sequence
  misc_feature: DNAzyme
gttgcacaggctagctacaacgagatgcatc

SEQ ID NO: 7233 - DNA, 31 bp, artificial sequence
  misc_feature: DNAzyme
cagttgcaggctagctacaacgaacgatgca

SEQ ID NO: 7234 - DNA, 31 bp, artificial sequence
  misc_feature: DNAzyme
atcagttgggctagctacaacgaacacgatg

SEQ ID NO: 7235 - DNA, 31 bp, artificial sequence
  misc_feature: DNAzyme
cgtatcagggctagctacaacgatgcacacg

SEQ ID NO: 7236 - DNA, 31 bp, artificial sequence
  misc_feature: DNAzyme
ccaacgtaggctagctacaacgacagttgca

SEQ ID NO: 7237 - DNA, 31 bp, artificial sequence
  misc_feature: DNAzyme
ctccaacgggctagctacaacgaatcagttg

SEQ ID NO: 7238 - DNA, 31 bp, artificial sequence
  misc_feature: DNAzyme
tcctccaaggctagctacaacgagtatcagt

SEQ ID NO: 7239 - DNA, 31 bp, artificial sequence
  misc_feature: DNAzyme
acatcatgggctagctacaacgatcctccaa

SEQ ID NO: 7240 - DNA, 31 bp, artificial sequence
  misc_feature: DNAzyme
taacatcaggctagctacaacgagctcctcc

SEQ ID NO: 7241 - DNA, 31 bp, artificial sequence
  misc_feature: DNAzyme
tgataacaggctagctacaacgacatgctcc

SEQ ID NO: 7242 - DNA, 31 bp, artificial sequence
  misc_feature: DNAzyme
gttgataaggctagctacaacgaatcatgct

SEQ ID NO: 7243 - DNA, 31 bp, artificial sequence
  misc_feature: DNAzyme
ggagttgaggctagctacaacgaaacatcat

SEQ ID NO: 7244 - DNA, 31 bp, artificial sequence
  misc_feature: DNAzyme
acttggagggctagctacaacgatgataaca

SEQ ID NO: 7245 - DNA, 31 bp, artificial sequence
  misc_feature: DNAzyme
gaatacgaggctagctacaacgattggagtt

SEQ ID NO: 7246 - DNA, 31 bp, artificial sequence
  misc_feature: DNAzyme
ccggaataggctagctacaacgagacttgga

SEQ ID NO: 7247 - DNA, 31 bp, artificial sequence
  misc_feature: DNAzyme
aaccggaaggctagctacaacgaacgacttg

SEQ ID NO: 7248 - DNA, 31 bp, artificial sequence
  misc_feature: DNAzyme
cgccccaaggctagctacaacgacggaatac

SEQ ID NO: 7249 - DNA, 31 bp, artificial sequence
  misc_feature: DNAzyme
gggacccgggctagctacaacgacccaaccg

SEQ ID NO: 7250 - DNA, 31 bp, artificial sequence
  misc_feature: DNAzyme
cccggggaggctagctacaacgaccgcccca

SEQ ID NO: 7251 - DNA, 31 bp, artificial sequence
  misc_feature: DNAzyme
gtactctgggctagctacaacgacccccccg

SEQ ID NO: 7252 - DNA, 31 bp, artificial sequence
  misc_feature: DNAzyme
actaggtaggctagctacaacgatctgcccc

SEQ ID NO: 7253 - DNA, 31 bp, artificial sequence
  misc_feature: DNAzyme
tgactaggggctagctacaacgaactctgcc

SEQ ID NO: 7254 - DNA, 31 bp, artificial sequence
  misc_feature: DNAzyme
ggctatgaggctagctacaacgataggtact

SEQ ID NO: 7255 - DNA, 31 bp, artificial sequence
  misc_feature: DNAzyme
ggaggctaggctagctacaacgagactaggt

SEQ ID NO: 7256 - DNA, 31 bp, artificial sequence
  misc_feature: DNAzyme
cacggaggggctagctacaacgatatgacta

SEQ ID NO: 7257 - DNA, 31 bp, artificial sequence
  misc_feature: DNAzyme
agtcttcaggctagctacaacgaggaggcta

SEQ ID NO: 7258 - DNA, 31 bp, artificial sequence
  misc_feature: DNAzyme
cctacgagggctagctacaacgacttcacgg

SEQ ID NO: 7259 - DNA, 31 bp, artificial sequence
  misc_feature: DNAzyme
cgagcctaggctagctacaacgagagtcttc

SEQ ID NO: 7260 - DNA, 31 bp, artificial sequence
  misc_feature: DNAzyme
gcggcgagggctagctacaacgactacgagt

SEQ ID NO: 7261 - DNA, 31 bp, artificial sequence
  misc_feature: DNAzyme
ggacgcggggctagctacaacgagagcctac

SEQ ID NO: 7262 - DNA, 31 bp, artificial sequence
  misc_feature: DNAzyme
agaggacgggctagctacaacgaggcgagcc

SEQ ID NO: 7263 - DNA, 31 bp, artificial sequence
  misc_feature: DNAzyme
caagaggaggctagctacaacgagcggcgag

SEQ ID NO: 7264 - DNA, 31 bp, artificial sequence
  misc_feature: DNAzyme
tgcggggaggctagctacaacgaccaagagg

SEQ ID NO: 7265 - DNA, 31 bp, artificial sequence
  misc_feature: DNAzyme
tgaaagtgggctagctacaacgaggggaccc

SEQ ID NO: 7266 - DNA, 31 bp, artificial sequence
  misc_feature: DNAzyme
tgtgaaagggctagctacaacgagcggggac

SEQ ID NO: 7267 - DNA, 31 bp, artificial sequence
  misc_feature: DNAzyme
gttatctgggctagctacaacgagaaagtgc

SEQ ID NO: 7268 - DNA, 31 bp, artificial sequence
  misc_feature: DNAzyme
ggtcgttaggctagctacaacgactgtgaaa

SEQ ID NO: 7269 - DNA, 31 bp, artificial sequence
  misc_feature: DNAzyme
cctggtcgggctagctacaacgatatctgtg

SEQ ID NO: 7270 - DNA, 31 bp, artificial sequence
  misc_feature: DNAzyme
cgacctggggctagctacaacgacgttatct

SEQ ID NO: 7271 - DNA, 31 bp, artificial sequence
  misc_feature: DNAzyme
ggagacgaggctagctacaacgactggtcgt

SEQ ID NO: 7272 - DNA, 31 bp, artificial sequence
  misc_feature: DNAzyme
tgtggagaggctagctacaacgagacctggt

SEQ ID NO: 7273 - DNA, 31 bp, artificial sequence
  misc_feature: DNAzyme
ctcgtgtgggctagctacaacgaggagacga

SEQ ID NO: 7274 - DNA, 31 bp, artificial sequence
  misc_feature: DNAzyme
tgctcgtgggctagctacaacgagtggagac

SEQ ID NO: 7275 - DNA, 31 bp, artificial sequence
  misc_feature: DNAzyme
gatgctcgggctagctacaacgagtgtggag

SEQ ID NO: 7276 - DNA, 31 bp, artificial sequence
  misc_feature: DNAzyme
gcacgatgggctagctacaacgatcgtgtgt

SEQ ID NO: 7277 - DNA, 31 bp, artificial sequence
  misc_feature: DNAzyme
ctgcacgaggctagctacaacgagctcgtgt

SEQ ID NO: 7278 - DNA, 31 bp, artificial sequence
  misc_feature: DNAzyme
ggactgcaggctagctacaacgagatgctcg

SEQ ID NO: 7279 - DNA, 31 bp, artificial sequence
  misc_feature: DNAzyme
caggactgggctagctacaacgaacgatgct

SEQ ID NO: 7280 - DNA, 31 bp, artificial sequence
  misc_feature: DNAzyme
ctccaggaggctagctacaacgatgcacgat

SEQ ID NO: 7281 - DNA, 31 bp, artificial sequence
  misc_feature: DNAzyme
ctgcgaagggctagctacaacgatccaggac

SEQ ID NO: 7282 - DNA, 31 bp, artificial sequence
  misc_feature: DNAzyme
tcgagctgggctagctacaacgagaagctcc

SEQ ID NO: 7283 - DNA, 31 bp, artificial sequence
  misc_feature: DNAzyme
ctgtcgagggctagctacaacgatgcgaagc

SEQ ID NO: 7284 - DNA, 31 bp, artificial sequence
  misc_feature: DNAzyme
gcggcctgggctagctacaacgacgagctgc

SEQ ID NO: 7285 - DNA, 31 bp, artificial sequence
  misc_feature: DNAzyme
ctctgcggggctagctacaacgactgtcgag

SEQ ID NO: 7286 - DNA, 31 bp, artificial sequence
  misc_feature: DNAzyme
agcctctgggctagctacaacgaggcctgtc

SEQ ID NO: 7287 - DNA, 31 bp, artificial sequence
  misc_feature: DNAzyme
cttgaaagggctagctacaacgactctgcgg

SEQ ID NO: 7288 - DNA, 31 bp, artificial sequence
  misc_feature: DNAzyme
acatgttaggctagctacaacgattgaaagc

SEQ ID NO: 7289 - DNA, 31 bp, artificial sequence
  misc_feature: DNAzyme
ctcacatgggctagctacaacgatacttgaa

SEQ ID NO: 7290 - DNA, 31 bp, artificial sequence
  misc_feature: DNAzyme
ccctcacaggctagctacaacgagttacttg

SEQ ID NO: 7291 - DNA, 31 bp, artificial sequence
  misc_feature: DNAzyme
taccctcaggctagctacaacgaatgttact

SEQ ID NO: 7292 - DNA, 31 bp, artificial sequence
  misc_feature: DNAzyme
tggtaataggctagctacaacgacctcacat

SEQ ID NO: 7293 - DNA, 31 bp, artificial sequence
  misc_feature: DNAzyme
tgtggtaaggctagctacaacgaaccctcac

SEQ ID NO: 7294 - DNA, 31 bp, artificial sequence
  misc_feature: DNAzyme
agctgtggggctagctacaacgaaataccct

SEQ ID NO: 7295 - DNA, 31 bp, artificial sequence
  misc_feature: DNAzyme
accagctgggctagctacaacgaggtaatac

SEQ ID NO: 7296 - DNA, 31 bp, artificial sequence
  misc_feature: DNAzyme
acgaccagggctagctacaacgatgtggtaa

SEQ ID NO: 7297 - DNA, 31 bp, artificial sequence
  misc_feature: DNAzyme
gctgacgaggctagctacaacgacagctgtg

SEQ ID NO: 7298 - DNA, 31 bp, artificial sequence
  misc_feature: DNAzyme
cgtgctgaggctagctacaacgagaccagct

SEQ ID NO: 7299 - DNA, 31 bp, artificial sequence
  misc_feature: DNAzyme
gcggcgtgggctagctacaacgatgacgacc

SEQ ID NO: 7300 - DNA, 31 bp, artificial sequence
  misc_feature: DNAzyme
gagcggcgggctagctacaacgagctgacga

SEQ ID NO: 7301 - DNA, 31 bp, artificial sequence
  misc_feature: DNAzyme
gcgagcggggctagctacaacgagtgctgac

SEQ ID NO: 7302 - DNA, 31 bp, artificial sequence
  misc_feature: DNAzyme
cgcgcgagggctagctacaacgaggcgtgct

SEQ ID NO: 7303 - DNA, 31 bp, artificial sequence
  misc_feature: DNAzyme
gtgccgcgggctagctacaacgagagcggcg

SEQ ID NO: 7304 - DNA, 31 bp, artificial sequence
  misc_feature: DNAzyme
cggtgccgggctagctacaacgagcgagcgg

SEQ ID NO: 7305 - DNA, 31 bp, artificial sequence
  misc_feature: DNAzyme
cgccggtgggctagctacaacgacgcgcgag

SEQ ID NO: 7306 - DNA, 31 bp, artificial sequence
  misc_feature: DNAzyme
atcgccggggctagctacaacgagccgcgcg

SEQ ID NO: 7307 - DNA, 31 bp, artificial sequence
  misc_feature: DNAzyme
ggttatcgggctagctacaacgacggtgccg

SEQ ID NO: 7308 - DNA, 31 bp, artificial sequence
  misc_feature: DNAzyme
tgcggttaggctagctacaacgacgccggtg

SEQ ID NO: 7309 - DNA, 31 bp, artificial sequence
  misc_feature: DNAzyme
aactgcggggctagctacaacgatatcgccg

SEQ ID NO: 7310 - DNA, 31 bp, artificial sequence
  misc_feature: DNAzyme
cagaactgggctagctacaacgaggttatcg

SEQ ID NO: 7311 - DNA, 31 bp, artificial sequence
  misc_feature: DNAzyme
gggcagaaggctagctacaacgatgcggtta

SEQ ID NO: 7312 - DNA, 31 bp, artificial sequence
  misc_feature: DNAzyme
caaaagggggctagctacaacgaagaactgc

SEQ ID NO: 7313 - DNA, 31 bp, artificial sequence
  misc_feature: DNAzyme
ctgactaaggctagctacaacgatcaaaagg

SEQ ID NO: 7314 - DNA, 31 bp, artificial sequence
  misc_feature: DNAzyme
tcctctgaggctagctacaacgataattcaa

SEQ ID NO: 7315 - DNA, 31 bp, artificial sequence
  misc_feature: DNAzyme
atcgggggggctagctacaacgacctctgac

SEQ ID NO: 7316 - DNA, 31 bp, artificial sequence
  misc_feature: DNAzyme
gctttataggctagctacaacgacgggggtc

SEQ ID NO: 7317 - DNA, 31 bp, artificial sequence
  misc_feature: DNAzyme
cggctttaggctagctacaacgaatcggggg

SEQ ID NO: 7318 - DNA, 31 bp, artificial sequence
  misc_feature: DNAzyme
cagagcggggctagctacaacgatttatatc

SEQ ID NO: 7319 - DNA, 31 bp, artificial sequence
  misc_feature: DNAzyme
tcacagagggctagctacaacgaggctttat

SEQ ID NO: 7320 - DNA, 31 bp, artificial sequence
  misc_feature: DNAzyme
gtcgctcaggctagctacaacgaagagcggc

SEQ ID NO: 7321 - DNA, 31 bp, artificial sequence
  misc_feature: DNAzyme
taaggtcgggctagctacaacgatcacagag

SEQ ID NO: 7322 - DNA, 31 bp, artificial sequence
  misc_feature: DNAzyme
ccataaggggctagctacaacgacgctcaca

SEQ ID NO: 7323 - DNA, 31 bp, artificial sequence
  misc_feature: DNAzyme
acaggccaggctagctacaacgaaaggtcgc

SEQ ID NO: 7324 - DNA, 31 bp, artificial sequence
  misc_feature: DNAzyme
cagacaggggctagctacaacgacataaggt

SEQ ID NO: 7325 - DNA, 31 bp, artificial sequence
  misc_feature: DNAzyme
aagccagaggctagctacaacgaaggccata

SEQ ID NO: 7326 - DNA, 31 bp, artificial sequence
  misc_feature: DNAzyme
ccccgaagggctagctacaacgacagacagg

SEQ ID NO: 7327 - DNA, 31 bp, artificial sequence
  misc_feature: DNAzyme
tgacttggggctagctacaacgaccccgaag

SEQ ID NO: 7328 - DNA, 31 bp, artificial sequence
  misc_feature: DNAzyme
tgttgtgaggctagctacaacgattggcccc

SEQ ID NO: 7329 - DNA, 31 bp, artificial sequence
  misc_feature: DNAzyme
caatgttgggctagctacaacgagacttggc

SEQ ID NO: 7330 - DNA, 31 bp, artificial sequence
  misc_feature: DNAzyme
taccaatgggctagctacaacgatgtgactt

SEQ ID NO: 7331 - DNA, 31 bp, artificial sequence
  misc_feature: DNAzyme
tttaccaaggctagctacaacgagttgtgac

SEQ ID NO: 7332 - DNA, 31 bp, artificial sequence
  misc_feature: DNAzyme
tcaatttaggctagctacaacgacaatgttg

SEQ ID NO: 7333 - DNA, 31 bp, artificial sequence
  misc_feature: DNAzyme
ggagtcaaggctagctacaacgattaccaat

SEQ ID NO: 7334 - DNA, 31 bp, artificial sequence
  misc_feature: DNAzyme
tcgaggagggctagctacaacgacaatttac

SEQ ID NO: 7335 - DNA, 31 bp, artificial sequence
  misc_feature: DNAzyme
catccgtgggctagctacaacgacgaggagt

SEQ ID NO: 7336 - DNA, 31 bp, artificial sequence
  misc_feature: DNAzyme
gacatccgggctagctacaacgagtcgagga

SEQ ID NO: 7337 - DNA, 31 bp, artificial sequence
  misc_feature: DNAzyme
gagtgacaggctagctacaacgaccgtgtcg

SEQ ID NO: 7338 - DNA, 31 bp, artificial sequence
  misc_feature: DNAzyme
gagagtgaggctagctacaacgaatccgtgt

SEQ ID NO: 7339 - DNA, 31 bp, artificial sequence
  misc_feature: DNAzyme
accgagagggctagctacaacgagacatccg

SEQ ID NO: 7340 - DNA, 31 bp, artificial sequence
  misc_feature: DNAzyme
aacagtcaggctagctacaacgacgagagtg

SEQ ID NO: 7341 - DNA, 31 bp, artificial sequence
  misc_feature: DNAzyme
ctcaacagggctagctacaacgacaccgaga

SEQ ID NO: 7342 - DNA, 31 bp, artificial sequence
  misc_feature: DNAzyme
cgactcaaggctagctacaacgaagtcaccg

SEQ ID NO: 7343 - DNA, 31 bp, artificial sequence
  misc_feature: DNAzyme
tgtttcgaggctagctacaacgatcaacagt

SEQ ID NO: 7344 - DNA, 31 bp, artificial sequence
  misc_feature: DNAzyme
acccgctgggctagctacaacgattcgactc

SEQ ID NO: 7345 - DNA, 31 bp, artificial sequence
  misc_feature: DNAzyme
gacacccgggctagctacaacgatgtttcga

SEQ ID NO: 7346 - DNA, 31 bp, artificial sequence
  misc_feature: DNAzyme
atatgacaggctagctacaacgaccgctgtt

SEQ ID NO: 7347 - DNA, 31 bp, artificial sequence
  misc_feature: DNAzyme
gcatatgaggctagctacaacgaacccgctg

SEQ ID NO: 7348 - DNA, 31 bp, artificial sequence
  misc_feature: DNAzyme
tttgcataggctagctacaacgagacacccg

SEQ ID NO: 7349 - DNA, 31 bp, artificial sequence
  misc_feature: DNAzyme
gctttgcaggctagctacaacgaatgacacc

SEQ ID NO: 7350 - DNA, 31 bp, artificial sequence
  misc_feature: DNAzyme
gggctttgggctagctacaacgaatatgaca

SEQ ID NO: 7351 - DNA, 31 bp, artificial sequence
  misc_feature: DNAzyme
cctatgggggctagctacaacgatttgcata

SEQ ID NO: 7352 - DNA, 31 bp, artificial sequence
  misc_feature: DNAzyme
atgccctaggctagctacaacgagggctttg

SEQ ID NO: 7353 - DNA, 31 bp, artificial sequence
  misc_feature: DNAzyme
aagaaatgggctagctacaacgacctatggg

SEQ ID NO: 7354 - DNA, 31 bp, artificial sequence
  misc_feature: DNAzyme
caaagaaaggctagctacaacgagccctatg

SEQ ID NO: 7355 - DNA, 31 bp, artificial sequence
  misc_feature: DNAzyme
cctggaaaggctagctacaacgacaaagaaa

SEQ ID NO: 7356 - DNA, 31 bp, artificial sequence
  misc_feature: DNAzyme
ggtgaatgggctagctacaacgactggaaat

SEQ ID NO: 7357 - DNA, 31 bp, artificial sequence
  misc_feature: DNAzyme
ctggtgaaggctagctacaacgagcctggaa

SEQ ID NO: 7358 - DNA, 31 bp, artificial sequence
  misc_feature: DNAzyme
gttcctggggctagctacaacgagaatgcct

SEQ ID NO: 7359 - DNA, 31 bp, artificial sequence
  misc_feature: DNAzyme
gggttgagggctagctacaacgatcctggtg

SEQ ID NO: 7360 - DNA, 31 bp, artificial sequence
  misc_feature: DNAzyme
gcagcgggggctagctacaacgatgagttcc

SEQ ID NO: 7361 - DNA, 31 bp, artificial sequence
  misc_feature: DNAzyme
ctgggcagggctagctacaacgagggttgag

SEQ ID NO: 7362 - DNA, 31 bp, artificial sequence
  misc_feature: DNAzyme
ctcctgggggctagctacaacgaagcgggtt

SEQ ID NO: 7363 - DNA, 31 bp, artificial sequence
  misc_feature: DNAzyme
ttccagtaggctagctacaacgatctcctgg

SEQ ID NO: 7364 - DNA, 31 bp, artificial sequence
  misc_feature: DNAzyme
gattccagggctagctacaacgaactctcct

SEQ ID NO: 7365 - DNA, 31 bp, artificial sequence
  misc_feature: DNAzyme
catacggaggctagctacaacgatccagtac

SEQ ID NO: 7366 - DNA, 31 bp, artificial sequence
  misc_feature: DNAzyme
tcttcataggctagctacaacgaggattcca

SEQ ID NO: 7367 - DNA, 31 bp, artificial sequence
  misc_feature: DNAzyme
gctcttcaggctagctacaacgaacggattc

SEQ ID NO: 7368 - DNA, 31 bp, artificial sequence
  misc_feature: DNAzyme
gtgatgggggctagctacaacgatcttcata

SEQ ID NO: 7369 - DNA, 31 bp, artificial sequence
  misc_feature: DNAzyme
ggccgtgaggctagctacaacgagggctctt

SEQ ID NO: 7370 - DNA, 31 bp, artificial sequence
  misc_feature: DNAzyme
tcaggccgggctagctacaacgagatgggct

SEQ ID NO: 7371 - DNA, 31 bp, artificial sequence
  misc_feature: DNAzyme
tcctcaggggctagctacaacgacgtgatgg

SEQ ID NO: 7372 - DNA, 31 bp, artificial sequence
  misc_feature: DNAzyme
ggtctccaggctagctacaacgaccttcctc

SEQ ID NO: 7373 - DNA, 31 bp, artificial sequence
  misc_feature: DNAzyme
cgacgtggggctagctacaacgactccaccc

SEQ ID NO: 7374 - DNA, 31 bp, artificial sequence
  misc_feature: DNAzyme
ttacgacgggctagctacaacgaggtctcca

SEQ ID NO: 7375 - DNA, 31 bp, artificial sequence
  misc_feature: DNAzyme
ctttacgaggctagctacaacgagtggtctc

SEQ ID NO: 7376 - DNA, 31 bp, artificial sequence
  misc_feature: DNAzyme
gccctttaggctagctacaacgagacgtggt

SEQ ID NO: 7377 - DNA, 31 bp, artificial sequence
  misc_feature: DNAzyme
gaaaatggggctagctacaacgacctttacg

SEQ ID NO: 7378 - DNA, 31 bp, artificial sequence
  misc_feature: DNAzyme
cgagaaaaggctagctacaacgaggcccttt

SEQ ID NO: 7379 - DNA, 31 bp, artificial sequence
  misc_feature: DNAzyme
cgtgtgtgggctagctacaacgagagaaaat

SEQ ID NO: 7380 - DNA, 31 bp, artificial sequence
  misc_feature: DNAzyme
ttcgtgtgggctagctacaacgagcgagaaa

SEQ ID NO: 7381 - DNA, 31 bp, artificial sequence
  misc_feature: DNAzyme
ggttcgtgggctagctacaacgagtgcgaga

SEQ ID NO: 7382 - DNA, 31 bp, artificial sequence
  misc_feature: DNAzyme
ggggttcgggctagctacaacgagtgtgcga

SEQ ID NO: 7383 - DNA, 31 bp, artificial sequence
  misc_feature: DNAzyme
cttgggggggctagctacaacgatcgtgtgt

SEQ ID NO: 7384 - DNA, 31 bp, artificial sequence
  misc_feature: DNAzyme
ttcccagaggctagctacaacgattgggggt

SEQ ID NO: 7385 - DNA, 31 bp, artificial sequence
  misc_feature: DNAzyme
ttatcgtgggctagctacaacgatcccagac

SEQ ID NO: 7386 - DNA, 31 bp, artificial sequence
  misc_feature: DNAzyme
ccttatcgggctagctacaacgagttcccag

SEQ ID NO: 7387 - DNA, 31 bp, artificial sequence
  misc_feature: DNAzyme
tcgccttaggctagctacaacgacgtgttcc

SEQ ID NO: 7388 - DNA, 31 bp, artificial sequence
  misc_feature: DNAzyme
ccagctcgggctagctacaacgacttatcgt

SEQ ID NO: 7389 - DNA, 31 bp, artificial sequence
  misc_feature: DNAzyme
caagccagggctagctacaacgatcgcctta

SEQ ID NO: 7390 - DNA, 31 bp, artificial sequence
  misc_feature: DNAzyme
gccgcaagggctagctacaacgacagctcgc

SEQ ID NO: 7391 - DNA, 31 bp, artificial sequence
  misc_feature: DNAzyme
ggaggccgggctagctacaacgaaagccagc

SEQ ID NO: 7392 - DNA, 31 bp, artificial sequence
  misc_feature: DNAzyme
aaaggaggggctagctacaacgacgcaagcc

SEQ ID NO: 7393 - DNA, 31 bp, artificial sequence
  misc_feature: DNAzyme
gcgtccaaggctagctacaacgacagagaaa

SEQ ID NO: 7394 - DNA, 31 bp, artificial sequence
  misc_feature: DNAzyme
tttctgcgggctagctacaacgaccaaccag

SEQ ID NO: 7395 - DNA, 31 bp, artificial sequence
  misc_feature: DNAzyme
gttttctgggctagctacaacgagtccaacc

SEQ ID NO: 7396 - DNA, 31 bp, artificial sequence
  misc_feature: DNAzyme
aaatgaggggctagctacaacgatttctgcg

SEQ ID NO: 7397 - DNA, 31 bp, artificial sequence
  misc_feature: DNAzyme
gcaaaaaaggctagctacaacgagaggtttt

SEQ ID NO: 7398 - DNA, 31 bp, artificial sequence
  misc_feature: DNAzyme
catcatggggctagctacaacgaaaaaaatg

SEQ ID NO: 7399 - DNA, 31 bp, artificial sequence
  misc_feature: DNAzyme
caccatcaggctagctacaacgaggcaaaaa

SEQ ID NO: 7400 - DNA, 31 bp, artificial sequence
  misc_feature: DNAzyme
taccaccaggctagctacaacgacatggcaa

SEQ ID NO: 7401 - DNA, 31 bp, artificial sequence
  misc_feature: DNAzyme
tgataccaggctagctacaacgacatcatgg

SEQ ID NO: 7402 - DNA, 31 bp, artificial sequence
  misc_feature: DNAzyme
aattgataggctagctacaacgacaccatca

SEQ ID NO: 7403 - DNA, 31 bp, artificial sequence
  misc_feature: DNAzyme
ccaattgaggctagctacaacgaaccaccat

SEQ ID NO: 7404 - DNA, 31 bp, artificial sequence
  misc_feature: DNAzyme
gacaccaaggctagctacaacgatgatacca

SEQ ID NO: 7405 - DNA, 31 bp, artificial sequence
  misc_feature: DNAzyme
ctgagacaggctagctacaacgacaattgat

SEQ ID NO: 7406 - DNA, 31 bp, artificial sequence
  misc_feature: DNAzyme
cactgagaggctagctacaacgaaccaattg

SEQ ID NO: 7407 - DNA, 31 bp, artificial sequence
  misc_feature: DNAzyme
ggaagacaggctagctacaacgatgagacac

SEQ ID NO: 7408 - DNA, 31 bp, artificial sequence
  misc_feature: DNAzyme
ctggaagaggctagctacaacgaactgagac

SEQ ID NO: 7409 - DNA, 31 bp, artificial sequence
  misc_feature: DNAzyme
aggacttgggctagctacaacgatggaagac

SEQ ID NO: 7410 - DNA, 31 bp, artificial sequence
  misc_feature: DNAzyme
tggaaggaggctagctacaacgattgctgga

SEQ ID NO: 7411 - DNA, 31 bp, artificial sequence
  misc_feature: DNAzyme
gctccgtgggctagctacaacgaggaaggac

SEQ ID NO: 7412 - DNA, 31 bp, artificial sequence
  misc_feature: DNAzyme
ccgctccgggctagctacaacgagtggaagg

SEQ ID NO: 7413 - DNA, 31 bp, artificial sequence
  misc_feature: DNAzyme
cacatccgggctagctacaacgatccgtgtg

SEQ ID NO: 7414 - DNA, 31 bp, artificial sequence
  misc_feature: DNAzyme
caaccacaggctagctacaacgaccgctccg

SEQ ID NO: 7415 - DNA, 31 bp, artificial sequence
  misc_feature: DNAzyme
gtcaaccaggctagctacaacgaatccgctc

SEQ ID NO: 7416 - DNA, 31 bp, artificial sequence
  misc_feature: DNAzyme
gccgtcaaggctagctacaacgacacatccg

SEQ ID NO: 7417 - DNA, 31 bp, artificial sequence
  misc_feature: DNAzyme
cggggccgggctagctacaacgacaaccaca

SEQ ID NO: 7418 - DNA, 31 bp, artificial sequence
  misc_feature: DNAzyme
cagcggggggctagctacaacgacgtcaacc

SEQ ID NO: 7419 - DNA, 31 bp, artificial sequence
  misc_feature: DNAzyme
ctatccagggctagctacaacgaggggccgt

SEQ ID NO: 7420 - DNA, 31 bp, artificial sequence
  misc_feature: DNAzyme
ggaacctaggctagctacaacgaccagcggg

SEQ ID NO: 7421 - DNA, 31 bp, artificial sequence
  misc_feature: DNAzyme
gtccggaaggctagctacaacgactatccag

SEQ ID NO: 7422 - DNA, 31 bp, artificial sequence
  misc_feature: DNAzyme
aaaggacgggctagctacaacgaccggaacc

SEQ ID NO: 7423 - DNA, 31 bp, artificial sequence
  misc_feature: DNAzyme
gcaaaggaggctagctacaacgagtccggaa

SEQ ID NO: 7424 - DNA, 31 bp, artificial sequence
  misc_feature: DNAzyme
ttatggggggctagctacaacgaaaaggacg

SEQ ID NO: 7425 - DNA, 31 bp, artificial sequence
  misc_feature: DNAzyme
tttggttaggctagctacaacgaggggcaaa

SEQ ID NO: 7426 - DNA, 31 bp, artificial sequence
  misc_feature: DNAzyme
aaatttggggctagctacaacgatatggggc

SEQ ID NO: 7427 - DNA, 31 bp, artificial sequence
  misc_feature: DNAzyme
ggtccaaaggctagctacaacgattggttat

SEQ ID NO: 7428 - DNA, 31 bp, artificial sequence
  misc_feature: DNAzyme
cggccaggggctagctacaacgaccaaattt

SEQ ID NO: 7429 - DNA, 31 bp, artificial sequence
  misc_feature: DNAzyme
acattcggggctagctacaacgacaggtcca

SEQ ID NO: 7430 - DNA, 31 bp, artificial sequence
  misc_feature: DNAzyme
cccccacaggctagctacaacgatcggccag

SEQ ID NO: 7431 - DNA, 31 bp, artificial sequence
  misc_feature: DNAzyme
cgcccccaggctagctacaacgaattcggcc

SEQ ID NO: 7432 - DNA, 31 bp, artificial sequence
  misc_feature: DNAzyme
gactgacgggctagctacaacgaccccacat

SEQ ID NO: 7433 - DNA, 31 bp, artificial sequence
  misc_feature: DNAzyme
cagactgaggctagctacaacgagcccccac

SEQ ID NO: 7434 - DNA, 31 bp, artificial sequence
  misc_feature: DNAzyme
cctgcagaggctagctacaacgatgacgccc

SEQ ID NO: 7435 - DNA, 31 bp, artificial sequence
  misc_feature: DNAzyme
gaagcctgggctagctacaacgaagactgac

SEQ ID NO: 7436 - DNA, 31 bp, artificial sequence
  misc_feature: DNAzyme
agaggaagggctagctacaacgactgcagac

SEQ ID NO: 7437 - DNA, 31 bp, artificial sequence
  misc_feature: DNAzyme
tctatccgggctagctacaacgaagaggaag

SEQ ID NO: 7438 - DNA, 31 bp, artificial sequence
  misc_feature: DNAzyme
aacttctaggctagctacaacgaccgtagag

SEQ ID NO: 7439 - DNA, 31 bp, artificial sequence
  misc_feature: DNAzyme
aggctaaaggctagctacaacgattctatcc

SEQ ID NO: 7440 - DNA, 31 bp, artificial sequence
  misc_feature: DNAzyme
agttaaggggctagctacaacgataaacttc

SEQ ID NO: 7441 - DNA, 31 bp, artificial sequence
  misc_feature: DNAzyme
gtccacagggctagctacaacgataaggcta

SEQ ID NO: 7442 - DNA, 31 bp, artificial sequence
  misc_feature: DNAzyme
ggcgtccaggctagctacaacgaagttaagg

SEQ ID NO: 7443 - DNA, 31 bp, artificial sequence
  misc_feature: DNAzyme
cgaaggcgggctagctacaacgaccacagtt

SEQ ID NO: 7444 - DNA, 31 bp, artificial sequence
  misc_feature: DNAzyme
ggcgaaggggctagctacaacgagtccacag

SEQ ID NO: 7445 - DNA, 31 bp, artificial sequence
  misc_feature: DNAzyme
gatgaaggggctagctacaacgagaaggcgt

SEQ ID NO: 7446 - DNA, 31 bp, artificial sequence
  misc_feature: DNAzyme
caaggagaggctagctacaacgagaaggcga

SEQ ID NO: 7447 - DNA, 31 bp, artificial sequence
  misc_feature: DNAzyme
gggacgtgggctagctacaacgatcaaggag

SEQ ID NO: 7448 - DNA, 31 bp, artificial sequence
  misc_feature: DNAzyme
ccgggacgggctagctacaacgagctcaagg

SEQ ID NO: 7449 - DNA, 31 bp, artificial sequence
  misc_feature: DNAzyme
taccgggaggctagctacaacgagtgctcaa

SEQ ID NO: 7450 - DNA, 31 bp, artificial sequence
  misc_feature: DNAzyme
gaccactaggctagctacaacgacgggacgt

SEQ ID NO: 7451 - DNA, 31 bp, artificial sequence
  misc_feature: DNAzyme
gacgaccaggctagctacaacgataccggga

SEQ ID NO: 7452 - DNA, 31 bp, artificial sequence
  misc_feature: DNAzyme
ctggacgaggctagctacaacgacactaccg

SEQ ID NO: 7453 - DNA, 31 bp, artificial sequence
  misc_feature: DNAzyme
gtcctggaggctagctacaacgagaccacta

SEQ ID NO: 7454 - DNA, 31 bp, artificial sequence
  misc_feature: DNAzyme
actgcaagggctagctacaacgacctggacg

SEQ ID NO: 7455 - DNA, 31 bp, artificial sequence
  misc_feature: DNAzyme
acagactgggctagctacaacgaaagtcctg

SEQ ID NO: 7456 - DNA, 31 bp, artificial sequence
  misc_feature: DNAzyme
ttgacagaggctagctacaacgatgcaagtc

SEQ ID NO: 7457 - DNA, 31 bp, artificial sequence
  misc_feature: DNAzyme
acctttgaggctagctacaacgaagactgca

SEQ ID NO: 7458 - DNA, 31 bp, artificial sequence
  misc_feature: DNAzyme
gaaggtcaggctagctacaacgactttgaca

SEQ ID NO: 7459 - DNA, 31 bp, artificial sequence
  misc_feature: DNAzyme
gaagaaggggctagctacaacgacacctttg

SEQ ID NO: 7460 - DNA, 31 bp, artificial sequence
  misc_feature: DNAzyme
gccagcggggctagctacaacgaagaagaag

SEQ ID NO: 7461 - DNA, 31 bp, artificial sequence
  misc_feature: DNAzyme
caagccagggctagctacaacgaggcagaag

SEQ ID NO: 7462 - DNA, 31 bp, artificial sequence
  misc_feature: DNAzyme
agcgcaagggctagctacaacgacagcggca

SEQ ID NO: 7463 - DNA, 31 bp, artificial sequence
  misc_feature: DNAzyme
tcgcagcgggctagctacaacgaaagccagc

SEQ ID NO: 7464 - DNA, 31 bp, artificial sequence
  misc_feature: DNAzyme
tctcgcagggctagctacaacgagcaagcca

SEQ ID NO: 7465 - DNA, 31 bp, artificial sequence
  misc_feature: DNAzyme
acatctcgggctagctacaacgaagcgcaag

SEQ ID NO: 7466 - DNA, 31 bp, artificial sequence
  misc_feature: DNAzyme
ctacaacaggctagctacaacgactcgcagc

SEQ ID NO: 7467 - DNA, 31 bp, artificial sequence
  misc_feature: DNAzyme
cgctacaaggctagctacaacgaatctcgca

SEQ ID NO: 7468 - DNA, 31 bp, artificial sequence
  misc_feature: DNAzyme
ctacgctaggctagctacaacgaaacatctc

SEQ ID NO: 7469 - DNA, 31 bp, artificial sequence
  misc_feature: DNAzyme
ggtctacgggctagctacaacgatacaacat

SEQ ID NO: 7470 - DNA, 31 bp, artificial sequence
  misc_feature: DNAzyme
atggtctaggctagctacaacgagctacaac

SEQ ID NO: 7471 - DNA, 31 bp, artificial sequence
  misc_feature: DNAzyme
caacatggggctagctacaacgactacgcta

SEQ ID NO: 7472 - DNA, 31 bp, artificial sequence
  misc_feature: DNAzyme
ccacaacaggctagctacaacgaggtctacg

SEQ ID NO: 7473 - DNA, 31 bp, artificial sequence
  misc_feature: DNAzyme
caccacaaggctagctacaacgaatggtcta

SEQ ID NO: 7474 - DNA, 31 bp, artificial sequence
  misc_feature: DNAzyme
cgtcaccaggctagctacaacgaaacatggt

SEQ ID NO: 7475 - DNA, 31 bp, artificial sequence
  misc_feature: DNAzyme
ctgcgtcaggctagctacaacgacacaacat

SEQ ID NO: 7476 - DNA, 31 bp, artificial sequence
  misc_feature: DNAzyme
ttgctgcgggctagctacaacgacaccacaa

SEQ ID NO: 7477 - DNA, 31 bp, artificial sequence
  misc_feature: DNAzyme
ctttgctgggctagctacaacgagtcaccac

SEQ ID NO: 7478 - DNA, 31 bp, artificial sequence
  misc_feature: DNAzyme
actctttgggctagctacaacgatgcgtcac

SEQ ID NO: 7479 - DNA, 31 bp, artificial sequence
  misc_feature: DNAzyme
ttgagcaaggctagctacaacgatctttgct

SEQ ID NO: 7480 - DNA, 31 bp, artificial sequence
  misc_feature: DNAzyme
gcgttgagggctagctacaacgaaactcttt

SEQ ID NO: 7481 - DNA, 31 bp, artificial sequence
  misc_feature: DNAzyme
tcaacgcgggctagctacaacgatgagcaac

SEQ ID NO: 7482 - DNA, 31 bp, artificial sequence
  misc_feature: DNAzyme
catcaacgggctagctacaacgagttgagca

SEQ ID NO: 7483 - DNA, 31 bp, artificial sequence
  misc_feature: DNAzyme
cccatcaaggctagctacaacgagcgttgag

SEQ ID NO: 7484 - DNA, 31 bp, artificial sequence
  misc_feature: DNAzyme
gttgcccaggctagctacaacgacaacgcgt

SEQ ID NO: 7485 - DNA, 31 bp, artificial sequence
  misc_feature: DNAzyme
gcaagttgggctagctacaacgaccatcaac

SEQ ID NO: 7486 - DNA, 31 bp, artificial sequence
  misc_feature: DNAzyme
aaagcaagggctagctacaacgatgcccatc

SEQ ID NO: 7487 - DNA, 31 bp, artificial sequence
  misc_feature: DNAzyme
gaggaaagggctagctacaacgaaagttgcc

SEQ ID NO: 7488 - DNA, 31 bp, artificial sequence
  misc_feature: DNAzyme
atgcgctgggctagctacaacgaggaggaaa

SEQ ID NO: 7489 - DNA, 31 bp, artificial sequence
  misc_feature: DNAzyme
gccatgcgggctagctacaacgatgcggagg

SEQ ID NO: 7490 - DNA, 31 bp, artificial sequence
  misc_feature: DNAzyme
acgccatgggctagctacaacgagctgcgga

SEQ ID NO: 7491 - DNA, 31 bp, artificial sequence
  misc_feature: DNAzyme
tcacgccaggctagctacaacgagcgctgcg

SEQ ID NO: 7492 - DNA, 31 bp, artificial sequence
  misc_feature: DNAzyme
tgatcacgggctagctacaacgacatgcgct

SEQ ID NO: 7493 - DNA, 31 bp, artificial sequence
  misc_feature: DNAzyme
cctgatcaggctagctacaacgagccatgcg

SEQ ID NO: 7494 - DNA, 31 bp, artificial sequence
  misc_feature: DNAzyme
cgccctgaggctagctacaacgacacgccat

SEQ ID NO: 7495 - DNA, 31 bp, artificial sequence
  misc_feature: DNAzyme
gacgggcgggctagctacaacgacctgatca

SEQ ID NO: 7496 - DNA, 31 bp, artificial sequence
  misc_feature: DNAzyme
tggacgggggctagctacaacgagccctgat

SEQ ID NO: 7497 - DNA, 31 bp, artificial sequence
  misc_feature: DNAzyme
cacatggaggctagctacaacgagggcgccc

SEQ ID NO: 7498 - DNA, 31 bp, artificial sequence
  misc_feature: DNAzyme
cctacacaggctagctacaacgaggacgggc

SEQ ID NO: 7499 - DNA, 31 bp, artificial sequence
  misc_feature: DNAzyme
gtcctacaggctagctacaacgaatggacgg

SEQ ID NO: 7500 - DNA, 31 bp, artificial sequence
  misc_feature: DNAzyme
atgtcctaggctagctacaacgaacatggac

SEQ ID NO: 7501 - DNA, 31 bp, artificial sequence
  misc_feature: DNAzyme
gctcgatgggctagctacaacgacctacaca

SEQ ID NO: 7502 - DNA, 31 bp, artificial sequence
  misc_feature: DNAzyme
ctgctcgaggctagctacaacgagtcctaca

SEQ ID NO: 7503 - DNA, 31 bp, artificial sequence
  misc_feature: DNAzyme
gtctgctgggctagctacaacgatcgatgtc

SEQ ID NO: 7504 - DNA, 31 bp, artificial sequence
  misc_feature: DNAzyme
gtcgtctgggctagctacaacgatgctcgat

SEQ ID NO: 7505 - DNA, 31 bp, artificial sequence
  misc_feature: DNAzyme
ggatgtcgggctagctacaacgactgctgct

SEQ ID NO: 7506 - DNA, 31 bp, artificial sequence
  misc_feature: DNAzyme
cgaggatgggctagctacaacgacgtctgct

SEQ ID NO: 7507 - DNA, 31 bp, artificial sequence
  misc_feature: DNAzyme
ggcgaggaggctagctacaacgagtcgtctg

SEQ ID NO: 7508 - DNA, 31 bp, artificial sequence
  misc_feature: DNAzyme
gaggctggggctagctacaacgagaggatgt

SEQ ID NO: 7509 - DNA, 31 bp, artificial sequence
  misc_feature: DNAzyme
cgaagaggggctagctacaacgatggcgagg

SEQ ID NO: 7510 - DNA, 31 bp, artificial sequence
  misc_feature: DNAzyme
accgtgagggctagctacaacgagaagaggc

SEQ ID NO: 7511 - DNA, 31 bp, artificial sequence
  misc_feature: DNAzyme
gtctaccgggctagctacaacgagagcgaag

SEQ ID NO: 7512 - DNA, 31 bp, artificial sequence
  misc_feature: DNAzyme
ttggtctaggctagctacaacgacgtgagcg

SEQ ID NO: 7513 - DNA, 31 bp, artificial sequence
  misc_feature: DNAzyme
ggtcttggggctagctacaacgactaccgtg

SEQ ID NO: 7514 - DNA, 31 bp, artificial sequence
  misc_feature: DNAzyme
gcgacgggggctagctacaacgacttggtct

SEQ ID NO: 7515 - DNA, 31 bp, artificial sequence
  misc_feature: DNAzyme
ctcagcgaggctagctacaacgagggtcttg

SEQ ID NO: 7516 - DNA, 31 bp, artificial sequence
  misc_feature: DNAzyme
gatctcagggctagctacaacgagacgggtc

SEQ ID NO: 7517 - DNA, 31 bp, artificial sequence
  misc_feature: DNAzyme
gatcccgaggctagctacaacgactcagcga

SEQ ID NO: 7518 - DNA, 31 bp, artificial sequence
  misc_feature: DNAzyme
ccgggggaggctagctacaacgacccgatct

SEQ ID NO: 7519 - DNA, 31 bp, artificial sequence
  misc_feature: DNAzyme
agggggagggctagctacaacgacgggggat

SEQ ID NO: 7520 - DNA, 31 bp, artificial sequence
  misc_feature: DNAzyme
cctctatgggctagctacaacgacccccctt

SEQ ID NO: 7521 - DNA, 31 bp, artificial sequence
  misc_feature: DNAzyme
ctcctctaggctagctacaacgagccccccc

SEQ ID NO: 7522 - DNA, 31 bp, artificial sequence
  misc_feature: DNAzyme
gagtcgtaggctagctacaacgatcctctat

SEQ ID NO: 7523 - DNA, 31 bp, artificial sequence
  misc_feature: DNAzyme
ttgagtcgggctagctacaacgaactcctct

SEQ ID NO: 7524 - DNA, 31 bp, artificial sequence
  misc_feature: DNAzyme
acgttgagggctagctacaacgacgtactcc

SEQ ID NO: 7525 - DNA, 31 bp, artificial sequence
  misc_feature: DNAzyme
atccgacgggctagctacaacgatgagtcgt

SEQ ID NO: 7526 - DNA, 31 bp, artificial sequence
  misc_feature: DNAzyme
ggatccgaggctagctacaacgagttgagtc

SEQ ID NO: 7527 - DNA, 31 bp, artificial sequence
  misc_feature: DNAzyme
acgcaggaggctagctacaacgaccgacgtt

SEQ ID NO: 7528 - DNA, 31 bp, artificial sequence
  misc_feature: DNAzyme
cggtgacgggctagctacaacgaaggatccg

SEQ ID NO: 7529 - DNA, 31 bp, artificial sequence
  misc_feature: DNAzyme
gacggtgaggctagctacaacgagcaggatc

SEQ ID NO: 7530 - DNA, 31 bp, artificial sequence
  misc_feature: DNAzyme
aatgacggggctagctacaacgagacgcagg

SEQ ID NO: 7531 - DNA, 31 bp, artificial sequence
  misc_feature: DNAzyme
tccaatgaggctagctacaacgaggtgacgc

SEQ ID NO: 7532 - DNA, 31 bp, artificial sequence
  misc_feature: DNAzyme
acctccaaggctagctacaacgagacggtga

SEQ ID NO: 7533 - DNA, 31 bp, artificial sequence
  misc_feature: DNAzyme
cgaccagaggctagctacaacgactccaatg

SEQ ID NO: 7534 - DNA, 31 bp, artificial sequence
  misc_feature: DNAzyme
ccccccgaggctagctacaacgacagacctc

SEQ ID NO: 7535 - DNA, 31 bp, artificial sequence
  misc_feature: DNAzyme
ggcaaccgggctagctacaacgacccccccg

SEQ ID NO: 7536 - DNA, 31 bp, artificial sequence
  misc_feature: DNAzyme
tacggcaaggctagctacaacgacgcccccc

SEQ ID NO: 7537 - DNA, 31 bp, artificial sequence
  misc_feature: DNAzyme
aggtacggggctagctacaacgaaaccgccc

SEQ ID NO: 7538 - DNA, 31 bp, artificial sequence
  misc_feature: DNAzyme
tagaggtaggctagctacaacgaggcaaccg

SEQ ID NO: 7539 - DNA, 31 bp, artificial sequence
  misc_feature: DNAzyme
gatagaggggctagctacaacgaacggcaac

SEQ ID NO: 7540 - DNA, 31 bp, artificial sequence
  misc_feature: DNAzyme
gccgctgaggctagctacaacgaagaggtac

SEQ ID NO: 7541 - DNA, 31 bp, artificial sequence
  misc_feature: DNAzyme
atcggccgggctagctacaacgatgatagag

SEQ ID NO: 7542 - DNA, 31 bp, artificial sequence
  misc_feature: DNAzyme
atcatcggggctagctacaacgacgctgata

SEQ ID NO: 7543 - DNA, 31 bp, artificial sequence
  misc_feature: DNAzyme
ctgaatcaggctagctacaacgacggccgct

SEQ ID NO: 7544 - DNA, 31 bp, artificial sequence
  misc_feature: DNAzyme
gctctgaaggctagctacaacgacatcggcc

SEQ ID NO: 7545 - DNA, 31 bp, artificial sequence
  misc_feature: DNAzyme
ttcggcagggctagctacaacgatctgaatc

SEQ ID NO: 7546 - DNA, 31 bp, artificial sequence
  misc_feature: DNAzyme
accttcggggctagctacaacgaagctctga

SEQ ID NO: 7547 - DNA, 31 bp, artificial sequence
  misc_feature: DNAzyme
cacaaagaggctagctacaacgacttcggca

SEQ ID NO: 7548 - DNA, 31 bp, artificial sequence
  misc_feature: DNAzyme
gctcgccaggctagctacaacgaaaagacct

SEQ ID NO: 7549 - DNA, 31 bp, artificial sequence
  misc_feature: DNAzyme
ggagctcgggctagctacaacgacacaaaga

SEQ ID NO: 7550 - DNA, 31 bp, artificial sequence
  misc_feature: DNAzyme
tggcggagggctagctacaacgatcgccaca

SEQ ID NO: 7551 - DNA, 31 bp, artificial sequence
  misc_feature: DNAzyme
tgccttggggctagctacaacgaggagctcg

SEQ ID NO: 7552 - DNA, 31 bp, artificial sequence
  misc_feature: DNAzyme
gtcttctgggctagctacaacgacttggcgg

SEQ ID NO: 7553 - DNA, 31 bp, artificial sequence
  misc_feature: DNAzyme
ccaccgtgggctagctacaacgacttctgcc

SEQ ID NO: 7554 - DNA, 31 bp, artificial sequence
  misc_feature: DNAzyme
gtccaccgggctagctacaacgagtcttctg

SEQ ID NO: 7555 - DNA, 31 bp, artificial sequence
  misc_feature: DNAzyme
agagtccaggctagctacaacgacgtgtctt

SEQ ID NO: 7556 - DNA, 31 bp, artificial sequence
  misc_feature: DNAzyme
tgacagagggctagctacaacgaccaccgtg

SEQ ID NO: 7557 - DNA, 31 bp, artificial sequence
  misc_feature: DNAzyme
tgttctgaggctagctacaacgaagagtcca

SEQ ID NO: 7558 - DNA, 31 bp, artificial sequence
  misc_feature: DNAzyme
gacggttgggctagctacaacgatctgacag

SEQ ID NO: 7559 - DNA, 31 bp, artificial sequence
  misc_feature: DNAzyme
gaggacggggctagctacaacgatgttctga

SEQ ID NO: 7560 - DNA, 31 bp, artificial sequence
  misc_feature: DNAzyme
gaagaggaggctagctacaacgaggttgttc

SEQ ID NO: 7561 - DNA, 31 bp, artificial sequence
  misc_feature: DNAzyme
cacctccaggctagctacaacgaggaggaag

SEQ ID NO: 7562 - DNA, 31 bp, artificial sequence
  misc_feature: DNAzyme
caataccaggctagctacaacgactccacgg

SEQ ID NO: 7563 - DNA, 31 bp, artificial sequence
  misc_feature: DNAzyme
ctccaataggctagctacaacgacacctcca

SEQ ID NO: 7564 - DNA, 31 bp, artificial sequence
  misc_feature: DNAzyme
ccctccaaggctagctacaacgaaccacctc

SEQ ID NO: 7565 - DNA, 31 bp, artificial sequence
  misc_feature: DNAzyme
tgccaaggggctagctacaacgaccctccaa

SEQ ID NO: 7566 - DNA, 31 bp, artificial sequence
  misc_feature: DNAzyme
gccacctgggctagctacaacgacaaggccc

SEQ ID NO: 7567 - DNA, 31 bp, artificial sequence
  misc_feature: DNAzyme
cattgccaggctagctacaacgactgccaag

SEQ ID NO: 7568 - DNA, 31 bp, artificial sequence
  misc_feature: DNAzyme
gcccattgggctagctacaacgacacctgcc

SEQ ID NO: 7569 - DNA, 31 bp, artificial sequence
  misc_feature: DNAzyme
ggtgcccaggctagctacaacgatgccacct

SEQ ID NO: 7570 - DNA, 31 bp, artificial sequence
  misc_feature: DNAzyme
cacgggtgggctagctacaacgaccattgcc

SEQ ID NO: 7571 - DNA, 31 bp, artificial sequence
  misc_feature: DNAzyme
tacacgggggctagctacaacgagcccattg

SEQ ID NO: 7572 - DNA, 31 bp, artificial sequence
  misc_feature: DNAzyme
gtggtacaggctagctacaacgagggtgccc

SEQ ID NO: 7573 - DNA, 31 bp, artificial sequence
  misc_feature: DNAzyme
cggtggtaggctagctacaacgaacgggtgc

SEQ ID NO: 7574 - DNA, 31 bp, artificial sequence
  misc_feature: DNAzyme
tccggtggggctagctacaacgaacacgggt

SEQ ID NO: 7575 - DNA, 31 bp, artificial sequence
  misc_feature: DNAzyme
ccctccggggctagctacaacgaggtacacg

SEQ ID NO: 7576 - DNA, 31 bp, artificial sequence
  misc_feature: DNAzyme
agactacgggctagctacaacgaccctccgg

SEQ ID NO: 7577 - DNA, 31 bp, artificial sequence
  misc_feature: DNAzyme
ccagactaggctagctacaacgagtccctcc

SEQ ID NO: 7578 - DNA, 31 bp, artificial sequence
  misc_feature: DNAzyme
gacccagaggctagctacaacgatacgtccc

SEQ ID NO: 7579 - DNA, 31 bp, artificial sequence
  misc_feature: DNAzyme
tggaaagaggctagctacaacgaccagacta

SEQ ID NO: 7580 - DNA, 31 bp, artificial sequence
  misc_feature: DNAzyme
tactagagggctagctacaacgacctggaaa

SEQ ID NO: 7581 - DNA, 31 bp, artificial sequence
  misc_feature: DNAzyme
ctccactaggctagctacaacgatagagccc

SEQ ID NO: 7582 - DNA, 31 bp, artificial sequence
  misc_feature: DNAzyme
accctccaggctagctacaacgatactagag

SEQ ID NO: 7583 - DNA, 31 bp, artificial sequence
  misc_feature: DNAzyme
gattacaaggctagctacaacgacctccact

SEQ ID NO: 7584 - DNA, 31 bp, artificial sequence
  misc_feature: DNAzyme
ccggattaggctagctacaacgaaaccctcc

SEQ ID NO: 7585 - DNA, 31 bp, artificial sequence
  misc_feature: DNAzyme
cgcccggaggctagctacaacgatacaaccc

SEQ ID NO: 7586 - DNA, 31 bp, artificial sequence
  misc_feature: DNAzyme
tgggcacgggctagctacaacgaccggatta

SEQ ID NO: 7587 - DNA, 31 bp, artificial sequence
  misc_feature: DNAzyme
tatgggcaggctagctacaacgagcccggat

SEQ ID NO: 7588 - DNA, 31 bp, artificial sequence
  misc_feature: DNAzyme
catatgggggctagctacaacgaacgcccgg

SEQ ID NO: 7589 - DNA, 31 bp, artificial sequence
  misc_feature: DNAzyme
tacccataggctagctacaacgagggcacgc

SEQ ID NO: 7590 - DNA, 31 bp, artificial sequence
  misc_feature: DNAzyme
gttacccaggctagctacaacgaatgggcac

SEQ ID NO: 7591 - DNA, 31 bp, artificial sequence
  misc_feature: DNAzyme
cagcgttaggctagctacaacgaccatatgg

SEQ ID NO: 7592 - DNA, 31 bp, artificial sequence
  misc_feature: DNAzyme
cttcagcgggctagctacaacgatacccata

SEQ ID NO: 7593 - DNA, 31 bp, artificial sequence
  misc_feature: DNAzyme
tccttcagggctagctacaacgagttaccca

SEQ ID NO: 7594 - DNA, 31 bp, artificial sequence
  misc_feature: DNAzyme
ccaagaagggctagctacaacgattccttca

SEQ ID NO: 7595 - DNA, 31 bp, artificial sequence
  misc_feature: DNAzyme
tgcggaaaggctagctacaacgaccaagaag

SEQ ID NO: 7596 - DNA, 31 bp, artificial sequence
  misc_feature: DNAzyme
agatcctgggctagctacaacgaggaaatcc

SEQ ID NO: 7597 - DNA, 31 bp, artificial sequence
  misc_feature: DNAzyme
ggcggagaggctagctacaacgacctgcgga

SEQ ID NO: 7598 - DNA, 31 bp, artificial sequence
  misc_feature: DNAzyme
cattccggggctagctacaacgaggagatcc

SEQ ID NO: 7599 - DNA, 31 bp, artificial sequence
  misc_feature: DNAzyme
ggtgtccaggctagctacaacgatccggcgg

SEQ ID NO: 7600 - DNA, 31 bp, artificial sequence
  misc_feature: DNAzyme
gagaggtgggctagctacaacgaccattccg

SEQ ID NO: 7601 - DNA, 31 bp, artificial sequence
  misc_feature: DNAzyme
gagagaggggctagctacaacgagtccattc

SEQ ID NO: 7602 - DNA, 31 bp, artificial sequence
  misc_feature: DNAzyme
gaggaggaggctagctacaacgagagagaga

SEQ ID NO: 7603 - DNA, 31 bp, artificial sequence
  misc_feature: DNAzyme
gcttcgagggctagctacaacgaggaggagg

SEQ ID NO: 7604 - DNA, 31 bp, artificial sequence
  misc_feature: DNAzyme
ttgacccgggctagctacaacgattcgagcg

SEQ ID NO: 7605 - DNA, 31 bp, artificial sequence
  misc_feature: DNAzyme
tcttttgaggctagctacaacgaccgcttcg

SEQ ID NO: 7606 - DNA, 31 bp, artificial sequence
  misc_feature: DNAzyme
accctggaggctagctacaacgatcttttga

SEQ ID NO: 7607 - DNA, 31 bp, artificial sequence
  misc_feature: DNAzyme
ggtagttaggctagctacaacgacctggact

SEQ ID NO: 7608 - DNA, 31 bp, artificial sequence
  misc_feature: DNAzyme
taaggtagggctagctacaacgataccctgg

SEQ ID NO: 7609 - DNA, 31 bp, artificial sequence
  misc_feature: DNAzyme
gaataaggggctagctacaacgaagttaccc

SEQ ID NO: 7610 - DNA, 31 bp, artificial sequence
  misc_feature: DNAzyme
tcagagaaggctagctacaacgaaaggtagt

SEQ ID NO: 7611 - DNA, 31 bp, artificial sequence
  misc_feature: DNAzyme
gcgtggagggctagctacaacgacagagaat

SEQ ID NO: 7612 - DNA, 31 bp, artificial sequence
  misc_feature: DNAzyme
cactcgcgggctagctacaacgaggagtcag

SEQ ID NO: 7613 - DNA, 31 bp, artificial sequence
  misc_feature: DNAzyme
atcactcgggctagctacaacgagtggagtc

SEQ ID NO: 7614 - DNA, 31 bp, artificial sequence
  misc_feature: DNAzyme
taacatcaggctagctacaacgatcgcgtgg

SEQ ID NO: 7615 - DNA, 31 bp, artificial sequence
  misc_feature: DNAzyme
cggtaacaggctagctacaacgacactcgcg

SEQ ID NO: 7616 - DNA, 31 bp, artificial sequence
  misc_feature: DNAzyme
ggcggtaaggctagctacaacgaatcactcg

SEQ ID NO: 7617 - DNA, 31 bp, artificial sequence
  misc_feature: DNAzyme
atgggcggggctagctacaacgaaacatcac

SEQ ID NO: 7618 - DNA, 31 bp, artificial sequence
  misc_feature: DNAzyme
gagatgggggctagctacaacgaggtaacat

SEQ ID NO: 7619 - DNA, 31 bp, artificial sequence
  misc_feature: DNAzyme
gcaggagaggctagctacaacgagggcggta

SEQ ID NO: 7620 - DNA, 31 bp, artificial sequence
  misc_feature: DNAzyme
tgtggcggggctagctacaacgaaggagatg

SEQ ID NO: 7621 - DNA, 31 bp, artificial sequence
  misc_feature: DNAzyme
tcctgtggggctagctacaacgaggcaggag

SEQ ID NO: 7622 - DNA, 31 bp, artificial sequence
  misc_feature: DNAzyme
acctcctgggctagctacaacgaggcggcag

SEQ ID NO: 7623 - DNA, 31 bp, artificial sequence
  misc_feature: DNAzyme
gaggccaaggctagctacaacgactcctgtg

SEQ ID NO: 7624 - DNA, 31 bp, artificial sequence
  misc_feature: DNAzyme
catcgaggggctagctacaacgacaacctcc

SEQ ID NO: 7625 - DNA, 31 bp, artificial sequence
  misc_feature: DNAzyme
tgacctcaggctagctacaacgacgaggcca

SEQ ID NO: 7626 - DNA, 31 bp, artificial sequence
  misc_feature: DNAzyme
gactttgaggctagctacaacgactcatcga

SEQ ID NO: 7627 - DNA, 31 bp, artificial sequence
  misc_feature: DNAzyme
tccccagaggctagctacaacgatttgacct

SEQ ID NO: 7628 - DNA, 31 bp, artificial sequence
  misc_feature: DNAzyme
caatatgaggctagctacaacgatccccaga

SEQ ID NO: 7629 - DNA, 31 bp, artificial sequence
  misc_feature: DNAzyme
acccaataggctagctacaacgagactcccc

SEQ ID NO: 7630 - DNA, 31 bp, artificial sequence
  misc_feature: DNAzyme
ttacccaaggctagctacaacgaatgactcc

SEQ ID NO: 7631 - DNA, 31 bp, artificial sequence
  misc_feature: DNAzyme
atacattaggctagctacaacgaccaatatg

SEQ ID NO: 7632 - DNA, 31 bp, artificial sequence
  misc_feature: DNAzyme
gacatacaggctagctacaacgatacccaat

SEQ ID NO: 7633 - DNA, 31 bp, artificial sequence
  misc_feature: DNAzyme
gcgacataggctagctacaacgaattaccca

SEQ ID NO: 7634 - DNA, 31 bp, artificial sequence
  misc_feature: DNAzyme
aggcgacaggctagctacaacgaacattacc

SEQ ID NO: 7635 - DNA, 31 bp, artificial sequence
  misc_feature: DNAzyme
gaaggcgaggctagctacaacgaatacatta

SEQ ID NO: 7636 - DNA, 31 bp, artificial sequence
  misc_feature: DNAzyme
ttcgaaggggctagctacaacgagacataca

SEQ ID NO: 7637 - DNA, 31 bp, artificial sequence
  misc_feature: DNAzyme
tgtctgcgggctagctacaacgacttcttcg

SEQ ID NO: 7638 - DNA, 31 bp, artificial sequence
  misc_feature: DNAzyme
gctgtctgggctagctacaacgagccttctt

SEQ ID NO: 7639 - DNA, 31 bp, artificial sequence
  misc_feature: DNAzyme
gccagctgggctagctacaacgactgcgcct

SEQ ID NO: 7640 - DNA, 31 bp, artificial sequence
  misc_feature: DNAzyme
ctagccagggctagctacaacgatgtctgcg

SEQ ID NO: 7641 - DNA, 31 bp, artificial sequence
  misc_feature: DNAzyme
tcagctagggctagctacaacgacagctgtc

SEQ ID NO: 7642 - DNA, 31 bp, artificial sequence
  misc_feature: DNAzyme
ctcctcagggctagctacaacgatagccagc

SEQ ID NO: 7643 - DNA, 31 bp, artificial sequence
  misc_feature: DNAzyme
ttggccagggctagctacaacgatcctcagc

SEQ ID NO: 7644 - DNA, 31 bp, artificial sequence
  misc_feature: DNAzyme
ctccttggggctagctacaacgacagctcct

SEQ ID NO: 7645 - DNA, 31 bp, artificial sequence
  misc_feature: DNAzyme
ccagggggggctagctacaacgactcccccc

SEQ ID NO: 7646 - DNA, 31 bp, artificial sequence
  misc_feature: DNAzyme
taggctggggctagctacaacgacagggggt

SEQ ID NO: 7647 - DNA, 31 bp, artificial sequence
  misc_feature: DNAzyme
agcgtaggggctagctacaacgatggccagg

SEQ ID NO: 7648 - DNA, 31 bp, artificial sequence
  misc_feature: DNAzyme
gctaagcgggctagctacaacgaaggctggc

SEQ ID NO: 7649 - DNA, 31 bp, artificial sequence
  misc_feature: DNAzyme
cggctaagggctagctacaacgagtaggctg

SEQ ID NO: 7650 - DNA, 31 bp, artificial sequence
  misc_feature: DNAzyme
agagacggggctagctacaacgataagcgta

SEQ ID NO: 7651 - DNA, 31 bp, artificial sequence
  misc_feature: DNAzyme
aggagagaggctagctacaacgaggctaagc

SEQ ID NO: 7652 - DNA, 31 bp, artificial sequence
  misc_feature: DNAzyme
ccacattaggctagctacaacgaaggagaga

SEQ ID NO: 7653 - DNA, 31 bp, artificial sequence
  misc_feature: DNAzyme
ctcccacaggctagctacaacgatacaggag

SEQ ID NO: 7654 - DNA, 31 bp, artificial sequence
  misc_feature: DNAzyme
ccctcccaggctagctacaacgaattacagg

SEQ ID NO: 7655 - DNA, 31 bp, artificial sequence
  misc_feature: DNAzyme
ctcaccgaggctagctacaacgaccctccca

SEQ ID NO: 7656 - DNA, 31 bp, artificial sequence
  misc_feature: DNAzyme
catgctcaggctagctacaacgacgacccct

SEQ ID NO: 7657 - DNA, 31 bp, artificial sequence
  misc_feature: DNAzyme
cgtccatgggctagctacaacgatcaccgac

SEQ ID NO: 7658 - DNA, 31 bp, artificial sequence
  misc_feature: DNAzyme
cacgtccaggctagctacaacgagctcaccg

SEQ ID NO: 7659 - DNA, 31 bp, artificial sequence
  misc_feature: DNAzyme
tgctcacgggctagctacaacgaccatgctc

SEQ ID NO: 7660 - DNA, 31 bp, artificial sequence
  misc_feature: DNAzyme
agtgctcaggctagctacaacgagtccatgc

SEQ ID NO: 7661 - DNA, 31 bp, artificial sequence
  misc_feature: DNAzyme
tagcagtgggctagctacaacgatcacgtcc

SEQ ID NO: 7662 - DNA, 31 bp, artificial sequence
  misc_feature: DNAzyme
tgtagcagggctagctacaacgagctcacgt

SEQ ID NO: 7663 - DNA, 31 bp, artificial sequence
  misc_feature: DNAzyme
ggatgtagggctagctacaacgaagtgctca

SEQ ID NO: 7664 - DNA, 31 bp, artificial sequence
  misc_feature: DNAzyme
accggatgggctagctacaacgaagcagtgc

SEQ ID NO: 7665 - DNA, 31 bp, artificial sequence
  misc_feature: DNAzyme
gaaccggaggctagctacaacgagtagcagt

SEQ ID NO: 7666 - DNA, 31 bp, artificial sequence
  misc_feature: DNAzyme
agcccgaaggctagctacaacgacggatgta

SEQ ID NO: 7667 - DNA, 31 bp, artificial sequence
  misc_feature: DNAzyme
catgcgagggctagctacaacgaccgaaccg

SEQ ID NO: 7668 - DNA, 31 bp, artificial sequence
  misc_feature: DNAzyme
ctcccatgggctagctacaacgagagcccga

SEQ ID NO: 7669 - DNA, 31 bp, artificial sequence
  misc_feature: DNAzyme
agctcccaggctagctacaacgagcgagccc

SEQ ID NO: 7670 - DNA, 31 bp, artificial sequence
  misc_feature: DNAzyme
ggtcacagggctagctacaacgatcccatgc

SEQ ID NO: 7671 - DNA, 31 bp, artificial sequence
  misc_feature: DNAzyme
ttgggtcaggctagctacaacgaagctccca

SEQ ID NO: 7672 - DNA, 31 bp, artificial sequence
  misc_feature: DNAzyme
tggttgggggctagctacaacgacacagctc

SEQ ID NO: 7673 - DNA, 31 bp, artificial sequence
  misc_feature: DNAzyme
atacctggggctagctacaacgatgggtcac

SEQ ID NO: 7674 - DNA, 31 bp, artificial sequence
  misc_feature: DNAzyme
aaccaataggctagctacaacgactggttgg

SEQ ID NO: 7675 - DNA, 31 bp, artificial sequence
  misc_feature: DNAzyme
tcaaccaaggctagctacaacgaacctggtt

SEQ ID NO: 7676 - DNA, 31 bp, artificial sequence
  misc_feature: DNAzyme
gggctcaaggctagctacaacgacaatacct

SEQ ID NO: 7677 - DNA, 31 bp, artificial sequence
  misc_feature: DNAzyme
aggtcgggggctagctacaacgatcaaccaa

SEQ ID NO: 7678 - DNA, 31 bp, artificial sequence
  misc_feature: DNAzyme
attccaggggctagctacaacgacgggctca

SEQ ID NO: 7679 - DNA, 31 bp, artificial sequence
  misc_feature: DNAzyme
aggtcacaggctagctacaacgatccaggtc

SEQ ID NO: 7680 - DNA, 31 bp, artificial sequence
  misc_feature: DNAzyme
ggaggtcaggctagctacaacgaattccagg

SEQ ID NO: 7681 - DNA, 31 bp, artificial sequence
  misc_feature: DNAzyme
ggaggaggggctagctacaacgacacattcc

SEQ ID NO: 7682 - DNA, 31 bp, artificial sequence
  misc_feature: DNAzyme
ctctcctaggctagctacaacgagggaggag

SEQ ID NO: 7683 - DNA, 31 bp, artificial sequence
  misc_feature: DNAzyme
cgtgtggaggctagctacaacgactctccta

SEQ ID NO: 7684 - DNA, 31 bp, artificial sequence
  misc_feature: DNAzyme
ccggcgtgggctagctacaacgaggacctct

SEQ ID NO: 7685 - DNA, 31 bp, artificial sequence
  misc_feature: DNAzyme
ctccggcgggctagctacaacgagtggacct

SEQ ID NO: 7686 - DNA, 31 bp, artificial sequence
  misc_feature: DNAzyme
cgctccggggctagctacaacgagtgtggac

SEQ ID NO: 7687 - DNA, 31 bp, artificial sequence
  misc_feature: DNAzyme
cagaaacgggctagctacaacgatccggcgt

SEQ ID NO: 7688 - DNA, 31 bp, artificial sequence
  misc_feature: DNAzyme
cacagaaaggctagctacaacgagctccggc

SEQ ID NO: 7689 - DNA, 31 bp, artificial sequence
  misc_feature: DNAzyme
cgcctgcaggctagctacaacgaagaaacgc

SEQ ID NO: 7690 - DNA, 31 bp, artificial sequence
  misc_feature: DNAzyme
tacgcctgggctagctacaacgaacagaaac

SEQ ID NO: 7691 - DNA, 31 bp, artificial sequence
  misc_feature: DNAzyme
ggggtacgggctagctacaacgactgcacag

SEQ ID NO: 7692 - DNA, 31 bp, artificial sequence
  misc_feature: DNAzyme
atggggtaggctagctacaacgagcctgcac

SEQ ID NO: 7693 - DNA, 31 bp, artificial sequence
  misc_feature: DNAzyme
ggatggggggctagctacaacgaacgcctgc

SEQ ID NO: 7694 - DNA, 31 bp, artificial sequence
  misc_feature: DNAzyme
gaagtggaggctagctacaacgaggggtacg

SEQ ID NO: 7695 - DNA, 31 bp, artificial sequence
  misc_feature: DNAzyme
cacggaagggctagctacaacgaggatgggg

SEQ ID NO: 7696 - DNA, 31 bp, artificial sequence
  misc_feature: DNAzyme
attcttcaggctagctacaacgaggaagtgg

SEQ ID NO: 7697 - DNA, 31 bp, artificial sequence
  misc_feature: DNAzyme
cccccgaaggctagctacaacgatcttcacg

SEQ ID NO: 7698 - DNA, 31 bp, artificial sequence
  misc_feature: DNAzyme
aggttccgggctagctacaacgacccccgaa

SEQ ID NO: 7699 - DNA, 31 bp, artificial sequence
  misc_feature: DNAzyme
gtgccaggggctagctacaacgatccgcccc

SEQ ID NO: 7700 - DNA, 31 bp, artificial sequence
  misc_feature: DNAzyme
tgcccgtgggctagctacaacgacaggttcc

SEQ ID NO: 7701 - DNA, 31 bp, artificial sequence
  misc_feature: DNAzyme
aatgcccgggctagctacaacgagccaggtt

SEQ ID NO: 7702 - DNA, 31 bp, artificial sequence
  misc_feature: DNAzyme
gtaaaatgggctagctacaacgaccgtgcca

SEQ ID NO: 7703 - DNA, 31 bp, artificial sequence
  misc_feature: DNAzyme
acgtaaaaggctagctacaacgagcccgtgc

SEQ ID NO: 7704 - DNA, 31 bp, artificial sequence
  misc_feature: DNAzyme
tgacaacgggctagctacaacgaaaaatgcc

SEQ ID NO: 7705 - DNA, 31 bp, artificial sequence
  misc_feature: DNAzyme
actgacaaggctagctacaacgagtaaaatg

SEQ ID NO: 7706 - DNA, 31 bp, artificial sequence
  misc_feature: DNAzyme
accactgaggctagctacaacgaaacgtaaa

SEQ ID NO: 7707 - DNA, 31 bp, artificial sequence
  misc_feature: DNAzyme
catgaccaggctagctacaacgatgacaacg

SEQ ID NO: 7708 - DNA, 31 bp, artificial sequence
  misc_feature: DNAzyme
gggcatgaggctagctacaacgacactgaca

SEQ ID NO: 7709 - DNA, 31 bp, artificial sequence
  misc_feature: DNAzyme
gacgggcaggctagctacaacgagaccactg

SEQ ID NO: 7710 - DNA, 31 bp, artificial sequence
  misc_feature: DNAzyme
gtgacgggggctagctacaacgaatgaccac

SEQ ID NO: 7711 - DNA, 31 bp, artificial sequence
  misc_feature: DNAzyme
ctacgtgaggctagctacaacgagggcatga

SEQ ID NO: 7712 - DNA, 31 bp, artificial sequence
  misc_feature: DNAzyme
ccactacgggctagctacaacgagacgggca

SEQ ID NO: 7713 - DNA, 31 bp, artificial sequence
  misc_feature: DNAzyme
ttccactaggctagctacaacgagtgacggg

SEQ ID NO: 7714 - DNA, 31 bp, artificial sequence
  misc_feature: DNAzyme
gatttccaggctagctacaacgatacgtgac

SEQ ID NO: 7715 - DNA, 31 bp, artificial sequence
  misc_feature: DNAzyme
gtgggggaggctagctacaacgattccacta

SEQ ID NO: 7716 - DNA, 31 bp, artificial sequence
  misc_feature: DNAzyme
tacgcgggggctagctacaacgagggggatt

SEQ ID NO: 7717 - DNA, 31 bp, artificial sequence
  misc_feature: DNAzyme
aggttacgggctagctacaacgagggtgggg

SEQ ID NO: 7718 - DNA, 31 bp, artificial sequence
  misc_feature: DNAzyme
ggaggttaggctagctacaacgagcgggtgg

SEQ ID NO: 7719 - DNA, 31 bp, artificial sequence
  misc_feature: DNAzyme
cgtggaggggctagctacaacgatacgcggg

SEQ ID NO: 7720 - DNA, 31 bp, artificial sequence
  misc_feature: DNAzyme
ggagtacgggctagctacaacgaggaggtta

SEQ ID NO: 7721 - DNA, 31 bp, artificial sequence
  misc_feature: DNAzyme
gaggagtaggctagctacaacgagtggaggt

SEQ ID NO: 7722 - DNA, 31 bp, artificial sequence
  misc_feature: DNAzyme
ctgaggagggctagctacaacgaacgtggag

SEQ ID NO: 7723 - DNA, 31 bp, artificial sequence
  misc_feature: DNAzyme
ggtggccgggctagctacaacgatgaggagt

SEQ ID NO: 7724 - DNA, 31 bp, artificial sequence
  misc_feature: DNAzyme
gcgggtggggctagctacaacgacgctgagg

SEQ ID NO: 7725 - DNA, 31 bp, artificial sequence
  misc_feature: DNAzyme
atggcgggggctagctacaacgaggccgctg

SEQ ID NO: 7726 - DNA, 31 bp, artificial sequence
  misc_feature: DNAzyme
cgctatggggctagctacaacgagggtggcc

SEQ ID NO: 7727 - DNA, 31 bp, artificial sequence
  misc_feature: DNAzyme
gggcgctaggctagctacaacgaggcgggtg

SEQ ID NO: 7728 - DNA, 31 bp, artificial sequence
  misc_feature: DNAzyme
ctagggcgggctagctacaacgatatggcgg

SEQ ID NO: 7729 - DNA, 31 bp, artificial sequence
  misc_feature: DNAzyme
ttctagggggctagctacaacgagctatggc

SEQ ID NO: 7730 - DNA, 31 bp, artificial sequence
  misc_feature: DNAzyme
ccaaactaggctagctacaacgatctagggc

SEQ ID NO: 7731 - DNA, 31 bp, artificial sequence
  misc_feature: DNAzyme
gcgccaaaggctagctacaacgatattctag

SEQ ID NO: 7732 - DNA, 31 bp, artificial sequence
  misc_feature: DNAzyme
ccccggcgggctagctacaacgacaaactat

SEQ ID NO: 7733 - DNA, 31 bp, artificial sequence
  misc_feature: DNAzyme
ctccccggggctagctacaacgagccaaact

SEQ ID NO: 7734 - DNA, 31 bp, artificial sequence
  misc_feature: DNAzyme
cctgcacaggctagctacaacgacctccccg

SEQ ID NO: 7735 - DNA, 31 bp, artificial sequence
  misc_feature: DNAzyme
cccctgcaggctagctacaacgaaccctccc

SEQ ID NO: 7736 - DNA, 31 bp, artificial sequence
  misc_feature: DNAzyme
ggcccctgggctagctacaacgaacaccctc

SEQ ID NO: 7737 - DNA, 31 bp, artificial sequence
  misc_feature: DNAzyme
accacgggggctagctacaacgaccctgcac

SEQ ID NO: 7738 - DNA, 31 bp, artificial sequence
  misc_feature: DNAzyme
atacaccaggctagctacaacgagggcccct

SEQ ID NO: 7739 - DNA, 31 bp, artificial sequence
  misc_feature: DNAzyme
cgcatacaggctagctacaacgacacgggcc

SEQ ID NO: 7740 - DNA, 31 bp, artificial sequence
  misc_feature: DNAzyme
aacgcataggctagctacaacgaaccacggg

SEQ ID NO: 7741 - DNA, 31 bp, artificial sequence
  misc_feature: DNAzyme
tcaacgcaggctagctacaacgaacaccacg

SEQ ID NO: 7742 - DNA, 31 bp, artificial sequence
  misc_feature: DNAzyme
catcaacgggctagctacaacgaatacacca

SEQ ID NO: 7743 - DNA, 31 bp, artificial sequence
  misc_feature: DNAzyme
cccatcaaggctagctacaacgagcatacac

SEQ ID NO: 7744 - DNA, 31 bp, artificial sequence
  misc_feature: DNAzyme
attccccaggctagctacaacgacaacgcat

SEQ ID NO: 7745 - DNA, 31 bp, artificial sequence
  misc_feature: DNAzyme
atggaacaggctagctacaacgatccccatc

SEQ ID NO: 7746 - DNA, 31 bp, artificial sequence
  misc_feature: DNAzyme
gcatggaaggctagctacaacgaattcccca

SEQ ID NO: 7747 - DNA, 31 bp, artificial sequence
  misc_feature: DNAzyme
acgtggcaggctagctacaacgaggaacatt

SEQ ID NO: 7748 - DNA, 31 bp, artificial sequence
  misc_feature: DNAzyme
acacgtggggctagctacaacgaatggaaca

SEQ ID NO: 7749 - DNA, 31 bp, artificial sequence
  misc_feature: DNAzyme
gcaacacgggctagctacaacgaggcatgga

SEQ ID NO: 7750 - DNA, 31 bp, artificial sequence
  misc_feature: DNAzyme
tagcaacaggctagctacaacgagtggcatg

SEQ ID NO: 7751 - DNA, 31 bp, artificial sequence
  misc_feature: DNAzyme
tgtagcaaggctagctacaacgaacgtggca

SEQ ID NO: 7752 - DNA, 31 bp, artificial sequence
  misc_feature: DNAzyme
acctgtagggctagctacaacgaaacacgtg

SEQ ID NO: 7753 - DNA, 31 bp, artificial sequence
  misc_feature: DNAzyme
aagacctgggctagctacaacgaagcaacac

SEQ ID NO: 7754 - DNA, 31 bp, artificial sequence
  misc_feature: DNAzyme
gcctaagaggctagctacaacgactgtagca

SEQ ID NO: 7755 - DNA, 31 bp, artificial sequence
  misc_feature: DNAzyme
tcgtcgggggctagctacaacgactaagacc

SEQ ID NO: 7756 - DNA, 31 bp, artificial sequence
  misc_feature: DNAzyme
gaggatcgggctagctacaacgacgggccta

SEQ ID NO: 7757 - DNA, 31 bp, artificial sequence
  misc_feature: DNAzyme
catgaggaggctagctacaacgacgtcgggc

SEQ ID NO: 7758 - DNA, 31 bp, artificial sequence
  misc_feature: DNAzyme
cggttccaggctagctacaacgagaggatcg

SEQ ID NO: 7759 - DNA, 31 bp, artificial sequence
  misc_feature: DNAzyme
aagaacggggctagctacaacgatccatgag

SEQ ID NO: 7760 - DNA, 31 bp, artificial sequence
  misc_feature: DNAzyme
gtcaagaaggctagctacaacgaggttccat

SEQ ID NO: 7761 - DNA, 31 bp, artificial sequence
  misc_feature: DNAzyme
tggacatgggctagctacaacgacaagaacg

SEQ ID NO: 7762 - DNA, 31 bp, artificial sequence
  misc_feature: DNAzyme
actggacaggctagctacaacgagtcaagaa

SEQ ID NO: 7763 - DNA, 31 bp, artificial sequence
  misc_feature: DNAzyme
tcactggaggctagctacaacgaatgtcaag

SEQ ID NO: 7764 - DNA, 31 bp, artificial sequence
  misc_feature: DNAzyme
gcagatcaggctagctacaacgatggacatg

SEQ ID NO: 7765 - DNA, 31 bp, artificial sequence
  misc_feature: DNAzyme
agcgcagaggctagctacaacgacactggac

SEQ ID NO: 7766 - DNA, 31 bp, artificial sequence
  misc_feature: DNAzyme
gcggagcgggctagctacaacgaagatcact

SEQ ID NO: 7767 - DNA, 31 bp, artificial sequence
  misc_feature: DNAzyme
atgcggagggctagctacaacgagcagatca

SEQ ID NO: 7768 - DNA, 31 bp, artificial sequence
  misc_feature: DNAzyme
tgcccatgggctagctacaacgaggagcgca

SEQ ID NO: 7769 - DNA, 31 bp, artificial sequence
  misc_feature: DNAzyme
cctgcccaggctagctacaacgagcggagcg

SEQ ID NO: 7770 - DNA, 31 bp, artificial sequence
  misc_feature: DNAzyme
accacctgggctagctacaacgaccatgcgg

SEQ ID NO: 7771 - DNA, 31 bp, artificial sequence
  misc_feature: DNAzyme
gcaaaccaggctagctacaacgactgcccat

SEQ ID NO: 7772 - DNA, 31 bp, artificial sequence
  misc_feature: DNAzyme
catgcaaaggctagctacaacgacacctgcc

SEQ ID NO: 7773 - DNA, 31 bp, artificial sequence
  misc_feature: DNAzyme
gtatcatgggctagctacaacgaaaaccacc

SEQ ID NO: 7774 - DNA, 31 bp, artificial sequence
  misc_feature: DNAzyme
cggtatcaggctagctacaacgagcaaacca

SEQ ID NO: 7775 - DNA, 31 bp, artificial sequence
  misc_feature: DNAzyme
agacggtaggctagctacaacgacatgcaaa

SEQ ID NO: 7776 - DNA, 31 bp, artificial sequence
  misc_feature: DNAzyme
ggagacggggctagctacaacgaatcatgca

SEQ ID NO: 7777 - DNA, 31 bp, artificial sequence
  misc_feature: DNAzyme
cggggagaggctagctacaacgaggtatcat

SEQ ID NO: 7778 - DNA, 31 bp, artificial sequence
  misc_feature: DNAzyme
gggtctggggctagctacaacgaggggagac

SEQ ID NO: 7779 - DNA, 31 bp, artificial sequence
  misc_feature: DNAzyme
caggggggggctagctacaacgactggcggg

SEQ ID NO: 7780 - DNA, 31 bp, artificial sequence
  misc_feature: DNAzyme
cgtgggtaggctagctacaacgaaggggggt

SEQ ID NO: 7781 - DNA, 31 bp, artificial sequence
  misc_feature: DNAzyme
aacgtgggggctagctacaacgaacaggggg

SEQ ID NO: 7782 - DNA, 31 bp, artificial sequence
  misc_feature: DNAzyme
tgccaacgggctagctacaacgagggtacag

SEQ ID NO: 7783 - DNA, 31 bp, artificial sequence
  misc_feature: DNAzyme
catgccaaggctagctacaacgagtgggtac

SEQ ID NO: 7784 - DNA, 31 bp, artificial sequence
  misc_feature: DNAzyme
ttctcatgggctagctacaacgacaacgtgg

SEQ ID NO: 7785 - DNA, 31 bp, artificial sequence
  misc_feature: DNAzyme
tcttctcaggctagctacaacgagccaacgt

SEQ ID NO: 7786 - DNA, 31 bp, artificial sequence
  misc_feature: DNAzyme
gccgggagggctagctacaacgaccctttct

SEQ ID NO: 7787 - DNA, 31 bp, artificial sequence
  misc_feature: DNAzyme
cgcggttgggctagctacaacgacgggagtc

SEQ ID NO: 7788 - DNA, 31 bp, artificial sequence
  misc_feature: DNAzyme
tgccgcggggctagctacaacgatgccggga

SEQ ID NO: 7789 - DNA, 31 bp, artificial sequence
  misc_feature: DNAzyme
tcctgccgggctagctacaacgaggttgccg

SEQ ID NO: 7790 - DNA, 31 bp, artificial sequence
  misc_feature: DNAzyme
agctcctgggctagctacaacgacgcggttg

SEQ ID NO: 7791 - DNA, 31 bp, artificial sequence
  misc_feature: DNAzyme
agtccaagggctagctacaacgatcctgccg

SEQ ID NO: 7792 - DNA, 31 bp, artificial sequence
  misc_feature: DNAzyme
ggcttcagggctagctacaacgaccaagctc

SEQ ID NO: 7793 - DNA, 31 bp, artificial sequence
  misc_feature: DNAzyme
agacctggggctagctacaacgattcagtcc

SEQ ID NO: 7794 - DNA, 31 bp, artificial sequence
  misc_feature: DNAzyme
cttcaagaggctagctacaacgactggcttc

SEQ ID NO: 7795 - DNA, 31 bp, artificial sequence
  misc_feature: DNAzyme
ttgactgaggctagctacaacgattcaagac

SEQ ID NO: 7796 - DNA, 31 bp, artificial sequence
  misc_feature: DNAzyme
ggtgttgaggctagctacaacgatgacttca

SEQ ID NO: 7797 - DNA, 31 bp, artificial sequence
  misc_feature: DNAzyme
gcacggtgggctagctacaacgatgactgac

SEQ ID NO: 7798 - DNA, 31 bp, artificial sequence
  misc_feature: DNAzyme
atgcacggggctagctacaacgagttgactg

SEQ ID NO: 7799 - DNA, 31 bp, artificial sequence
  misc_feature: DNAzyme
gatatgcaggctagctacaacgaggtgttga

SEQ ID NO: 7800 - DNA, 31 bp, artificial sequence
  misc_feature: DNAzyme
tggatatgggctagctacaacgaacggtgtt

SEQ ID NO: 7801 - DNA, 31 bp, artificial sequence
  misc_feature: DNAzyme
actggataggctagctacaacgagcacggtg

SEQ ID NO: 7802 - DNA, 31 bp, artificial sequence
  misc_feature: DNAzyme
ggactggaggctagctacaacgaatgcacgg

SEQ ID NO: 7803 - DNA, 31 bp, artificial sequence
  misc_feature: DNAzyme
gtttgggaggctagctacaacgatggatatg

SEQ ID NO: 7804 - DNA, 31 bp, artificial sequence
  misc_feature: DNAzyme
aagggatgggctagctacaacgattgggact

SEQ ID NO: 7805 - DNA, 31 bp, artificial sequence
  misc_feature: DNAzyme
ctaagggaggctagctacaacgagtttggga

SEQ ID NO: 7806 - DNA, 31 bp, artificial sequence
  misc_feature: DNAzyme
gctcgtggggctagctacaacgataagggat

SEQ ID NO: 7807 - DNA, 31 bp, artificial sequence
  misc_feature: DNAzyme
ccggctcgggctagctacaacgaggctaagg

SEQ ID NO: 7808 - DNA, 31 bp, artificial sequence
  misc_feature: DNAzyme
tgttccggggctagctacaacgatcgtggct

SEQ ID NO: 7809 - DNA, 31 bp, artificial sequence
  misc_feature: DNAzyme
acgccatgggctagctacaacgatccggctc

SEQ ID NO: 7810 - DNA, 31 bp, artificial sequence
  misc_feature: DNAzyme
ccacgccaggctagctacaacgagttccggc

SEQ ID NO: 7811 - DNA, 31 bp, artificial sequence
  misc_feature: DNAzyme
gctccacgggctagctacaacgacatgttcc

SEQ ID NO: 7812 - DNA, 31 bp, artificial sequence
  misc_feature: DNAzyme
ctgctccaggctagctacaacgagccatgtt

SEQ ID NO: 7813 - DNA, 31 bp, artificial sequence
  misc_feature: DNAzyme
gaggactgggctagctacaacgatccacgcc

SEQ ID NO: 7814 - DNA, 31 bp, artificial sequence
  misc_feature: DNAzyme
aatgaggaggctagctacaacgatgctccac

SEQ ID NO: 7815 - DNA, 31 bp, artificial sequence
  misc_feature: DNAzyme
tggatcaaggctagctacaacgagaggactg

SEQ ID NO: 7816 - DNA, 31 bp, artificial sequence
  misc_feature: DNAzyme
tcagtggaggctagctacaacgacaatgagg

SEQ ID NO: 7817 - DNA, 31 bp, artificial sequence
  misc_feature: DNAzyme
tccatcagggctagctacaacgaggatcaat

SEQ ID NO: 7818 - DNA, 31 bp, artificial sequence
  misc_feature: DNAzyme
aggctccaggctagctacaacgacagtggat

SEQ ID NO: 7819 - DNA, 31 bp, artificial sequence
  misc_feature: DNAzyme
tgaggaggggctagctacaacgatccatcag

SEQ ID NO: 7820 - DNA, 31 bp, artificial sequence
  misc_feature: DNAzyme
ctcagctgggctagctacaacgatgaggagg

SEQ ID NO: 7821 - DNA, 31 bp, artificial sequence
  misc_feature: DNAzyme
tcactcagggctagctacaacgatgctgagg

SEQ ID NO: 7822 - DNA, 31 bp, artificial sequence
  misc_feature: DNAzyme
caccatcaggctagctacaacgatcagctgc

SEQ ID NO: 7823 - DNA, 31 bp, artificial sequence
  misc_feature: DNAzyme
cctcaccaggctagctacaacgacactcagc

SEQ ID NO: 7824 - DNA, 31 bp, artificial sequence
  misc_feature: DNAzyme
cagcctcaggctagctacaacgacatcactc

SEQ ID NO: 7825 - DNA, 31 bp, artificial sequence
  misc_feature: DNAzyme
ctctccagggctagctacaacgactcaccat

SEQ ID NO: 7826 - DNA, 31 bp, artificial sequence
  misc_feature: DNAzyme
cacacaaaggctagctacaacgacctctcca

SEQ ID NO: 7827 - DNA, 31 bp, artificial sequence
  misc_feature: DNAzyme
gcgtcacaggctagctacaacgaaaatcctc

SEQ ID NO: 7828 - DNA, 31 bp, artificial sequence
  misc_feature: DNAzyme
gcgcgtcaggctagctacaacgaacaaatcc

SEQ ID NO: 7829 - DNA, 31 bp, artificial sequence
  misc_feature: DNAzyme
ggcgcgcgggctagctacaacgacacacaaa

SEQ ID NO: 7830 - DNA, 31 bp, artificial sequence
  misc_feature: DNAzyme
gcggcgcgggctagctacaacgagtcacaca

SEQ ID NO: 7831 - DNA, 31 bp, artificial sequence
  misc_feature: DNAzyme
cagcggcgggctagctacaacgagcgtcaca

SEQ ID NO: 7832 - DNA, 31 bp, artificial sequence
  misc_feature: DNAzyme
cgcagcggggctagctacaacgagcgcgtca

SEQ ID NO: 7833 - DNA, 31 bp, artificial sequence
  misc_feature: DNAzyme
cgacgcagggctagctacaacgaggcgcgcg

SEQ ID NO: 7834 - DNA, 31 bp, artificial sequence
  misc_feature: DNAzyme
gagcgacgggctagctacaacgaagcggcgc

SEQ ID NO: 7835 - DNA, 31 bp, artificial sequence
  misc_feature: DNAzyme
gagagcgaggctagctacaacgagcagcggc

SEQ ID NO: 7836 - DNA, 31 bp, artificial sequence
  misc_feature: DNAzyme
cctgagagggctagctacaacgagacgcagc

SEQ ID NO: 7837 - DNA, 31 bp, artificial sequence
  misc_feature: DNAzyme
actatgtgggctagctacaacgactgagagc

SEQ ID NO: 7838 - DNA, 31 bp, artificial sequence
  misc_feature: DNAzyme
gcactatgggctagctacaacgagcctgaga

SEQ ID NO: 7839 - DNA, 31 bp, artificial sequence
  misc_feature: DNAzyme
acgcactaggctagctacaacgagtgcctga

SEQ ID NO: 7840 - DNA, 31 bp, artificial sequence
  misc_feature: DNAzyme
cccacgcaggctagctacaacgatatgtgcc

SEQ ID NO: 7841 - DNA, 31 bp, artificial sequence
  misc_feature: DNAzyme
cccccacgggctagctacaacgaactatgtg

SEQ ID NO: 7842 - DNA, 31 bp, artificial sequence
  misc_feature: DNAzyme
ctcccccaggctagctacaacgagcactatg

SEQ ID NO: 7843 - DNA, 31 bp, artificial sequence
  misc_feature: DNAzyme
caaccatgggctagctacaacgactccccca

SEQ ID NO: 7844 - DNA, 31 bp, artificial sequence
  misc_feature: DNAzyme
ggcaaccaggctagctacaacgagtctcccc

SEQ ID NO: 7845 - DNA, 31 bp, artificial sequence
  misc_feature: DNAzyme
cggggcaaggctagctacaacgacatgtctc

SEQ ID NO: 7846 - DNA, 31 bp, artificial sequence
  misc_feature: DNAzyme
tcgcggggggctagctacaacgaaaccatgt

SEQ ID NO: 7847 - DNA, 31 bp, artificial sequence
  misc_feature: DNAzyme
tcgcttcgggctagctacaacgaggggcaac

SEQ ID NO: 7848 - DNA, 31 bp, artificial sequence
  misc_feature: DNAzyme
agcgttcgggctagctacaacgattcgcggg

SEQ ID NO: 7849 - DNA, 31 bp, artificial sequence
  misc_feature: DNAzyme
tgatagcgggctagctacaacgatcgcttcg

SEQ ID NO: 7850 - DNA, 31 bp, artificial sequence
  misc_feature: DNAzyme
gctgatagggctagctacaacgagttcgctt

SEQ ID NO: 7851 - DNA, 31 bp, artificial sequence
  misc_feature: DNAzyme
tcggctgaggctagctacaacgaagcgttcg

SEQ ID NO: 7852 - DNA, 31 bp, artificial sequence
  misc_feature: DNAzyme
tgaatcggggctagctacaacgatgatagcg

SEQ ID NO: 7853 - DNA, 31 bp, artificial sequence
  misc_feature: DNAzyme
tggatgaaggctagctacaacgacggctgat

SEQ ID NO: 7854 - DNA, 31 bp, artificial sequence
  misc_feature: DNAzyme
gcagtggaggctagctacaacgagaatcggc

SEQ ID NO: 7855 - DNA, 31 bp, artificial sequence
  misc_feature: DNAzyme
ctgtgcagggctagctacaacgaggatgaat

SEQ ID NO: 7856 - DNA, 31 bp, artificial sequence
  misc_feature: DNAzyme
gcgctgtgggctagctacaacgaagtggatg

SEQ ID NO: 7857 - DNA, 31 bp, artificial sequence
  misc_feature: DNAzyme
gggcgctgggctagctacaacgagcagtgga

SEQ ID NO: 7858 - DNA, 31 bp, artificial sequence
  misc_feature: DNAzyme
agagggcgggctagctacaacgatgtgcagt

SEQ ID NO: 7859 - DNA, 31 bp, artificial sequence
  misc_feature: DNAzyme
ggagagggggctagctacaacgagctgtgca

SEQ ID NO: 7860 - DNA, 31 bp, artificial sequence
  misc_feature: DNAzyme
catgtgggggctagctacaacgaccaggaga

SEQ ID NO: 7861 - DNA, 31 bp, artificial sequence
  misc_feature: DNAzyme
tcggcatgggctagctacaacgagggcccag

SEQ ID NO: 7862 - DNA, 31 bp, artificial sequence
  misc_feature: DNAzyme
cgtcggcaggctagctacaacgagtgggccc

SEQ ID NO: 7863 - DNA, 31 bp, artificial sequence
  misc_feature: DNAzyme
tgcgtcggggctagctacaacgaatgtgggc

SEQ ID NO: 7864 - DNA, 31 bp, artificial sequence
  misc_feature: DNAzyme
atactgcgggctagctacaacgacggcatgt

SEQ ID NO: 7865 - DNA, 31 bp, artificial sequence
  misc_feature: DNAzyme
cgatactgggctagctacaacgagtcggcat

SEQ ID NO: 7866 - DNA, 31 bp, artificial sequence
  misc_feature: DNAzyme
cagcgataggctagctacaacgatgcgtcgg

SEQ ID NO: 7867 - DNA, 31 bp, artificial sequence
  misc_feature: DNAzyme
cgcagcgaggctagctacaacgaactgcgtc

SEQ ID NO: 7868 - DNA, 31 bp, artificial sequence
  misc_feature: DNAzyme
gtgcgcagggctagctacaacgagatactgc

SEQ ID NO: 7869 - DNA, 31 bp, artificial sequence
  misc_feature: DNAzyme
ggtgtgcgggctagctacaacgaagcgatac

SEQ ID NO: 7870 - DNA, 31 bp, artificial sequence
  misc_feature: DNAzyme
gtggtgtgggctagctacaacgagcagcgat

SEQ ID NO: 7871 - DNA, 31 bp, artificial sequence
  misc_feature: DNAzyme
gggtggtgggctagctacaacgagcgcagcg

SEQ ID NO: 7872 - DNA, 31 bp, artificial sequence
  misc_feature: DNAzyme
cggggtggggctagctacaacgagtgcgcag

SEQ ID NO: 7873 - DNA, 31 bp, artificial sequence
  misc_feature: DNAzyme
cgtcggggggctagctacaacgaggtgtgcg

SEQ ID NO: 7874 - DNA, 31 bp, artificial sequence
  misc_feature: DNAzyme
cctggtcgggctagctacaacgacggggtgg

SEQ ID NO: 7875 - DNA, 31 bp, artificial sequence
  misc_feature: DNAzyme
cgccctggggctagctacaacgacgtcgggg

SEQ ID NO: 7876 - DNA, 31 bp, artificial sequence
  misc_feature: DNAzyme
tcctggcgggctagctacaacgacctggtcg

SEQ ID NO: 7877 - DNA, 31 bp, artificial sequence
  misc_feature: DNAzyme
tctcctggggctagctacaacgagccctggt

SEQ ID NO: 7878 - DNA, 31 bp, artificial sequence
  misc_feature: DNAzyme
ccctgccaggctagctacaacgacctctctc

SEQ ID NO: 7879 - DNA, 31 bp, artificial sequence
  misc_feature: DNAzyme
actccctgggctagctacaacgacatcctct

SEQ ID NO: 7880 - DNA, 31 bp, artificial sequence
  misc_feature: DNAzyme
tcaacttaggctagctacaacgatccctgcc

SEQ ID NO: 7881 - DNA, 31 bp, artificial sequence
  misc_feature: DNAzyme
ctggtcaaggctagctacaacgattactccc

SEQ ID NO: 7882 - DNA, 31 bp, artificial sequence
  misc_feature: DNAzyme
ggacctggggctagctacaacgacaacttac

SEQ ID NO: 7883 - DNA, 31 bp, artificial sequence
  misc_feature: DNAzyme
accgaggaggctagctacaacgactggtcaa

SEQ ID NO: 7884 - DNA, 31 bp, artificial sequence
  misc_feature: DNAzyme
gccttctaggctagctacaacgacgaggacc

SEQ ID NO: 7885 - DNA, 31 bp, artificial sequence
  misc_feature: DNAzyme
gggagatgggctagctacaacgacttctacc

SEQ ID NO: 7886 - DNA, 31 bp, artificial sequence
  misc_feature: DNAzyme
cggggagaggctagctacaacgagccttcta

SEQ ID NO: 7887 - DNA, 31 bp, artificial sequence
  misc_feature: DNAzyme
gtcatgagggctagctacaacgaggggagat

SEQ ID NO: 7888 - DNA, 31 bp, artificial sequence
  misc_feature: DNAzyme
caaggtcaggctagctacaacgagagcgggg

SEQ ID NO: 7889 - DNA, 31 bp, artificial sequence
  misc_feature: DNAzyme
cttcaaggggctagctacaacgacatgagcg

SEQ ID NO: 7890 - DNA, 31 bp, artificial sequence
  misc_feature: DNAzyme
tctcgtggggctagctacaacgacttcaagg

SEQ ID NO: 7891 - DNA, 31 bp, artificial sequence
  misc_feature: DNAzyme
tgctctcgggctagctacaacgaggccttca

SEQ ID NO: 7892 - DNA, 31 bp, artificial sequence
  misc_feature: DNAzyme
ggcgggtgggctagctacaacgatctcgtgg

SEQ ID NO: 7893 - DNA, 31 bp, artificial sequence
  misc_feature: DNAzyme
gtggcgggggctagctacaacgagctctcgt

SEQ ID NO: 7894 - DNA, 31 bp, artificial sequence
  misc_feature: DNAzyme
aggagtggggctagctacaacgagggtgctc

SEQ ID NO: 7895 - DNA, 31 bp, artificial sequence
  misc_feature: DNAzyme
agcaggagggctagctacaacgaggcgggtg

SEQ ID NO: 7896 - DNA, 31 bp, artificial sequence
  misc_feature: DNAzyme
ctatggagggctagctacaacgaaggagtgg

SEQ ID NO: 7897 - DNA, 31 bp, artificial sequence
  misc_feature: DNAzyme
gcgggctaggctagctacaacgaggagcagg

SEQ ID NO: 7898 - DNA, 31 bp, artificial sequence
  misc_feature: DNAzyme
ctggcgggggctagctacaacgatatggagc

SEQ ID NO: 7899 - DNA, 31 bp, artificial sequence
  misc_feature: DNAzyme
cattctggggctagctacaacgagggctatg

SEQ ID NO: 7900 - DNA, 31 bp, artificial sequence
  misc_feature: DNAzyme
tgtagacaggctagctacaacgatctggcgg

SEQ ID NO: 7901 - DNA, 31 bp, artificial sequence
  misc_feature: DNAzyme
cttgtagaggctagctacaacgaattctggc

SEQ ID NO: 7902 - DNA, 31 bp, artificial sequence
  misc_feature: DNAzyme
ggtgcttgggctagctacaacgaagacattc

SEQ ID NO: 7903 - DNA, 31 bp, artificial sequence
  misc_feature: DNAzyme
ggaaggtgggctagctacaacgattgtagac

SEQ ID NO: 7904 - DNA, 31 bp, artificial sequence
  misc_feature: DNAzyme
tgggaaggggctagctacaacgagcttgtag

SEQ ID NO: 7905 - DNA, 31 bp, artificial sequence
  misc_feature: DNAzyme
agcataggggctagctacaacgacttgggaa

SEQ ID NO: 7906 - DNA, 31 bp, artificial sequence
  misc_feature: DNAzyme
tggcagcaggctagctacaacgaaggccttg

SEQ ID NO: 7907 - DNA, 31 bp, artificial sequence
  misc_feature: DNAzyme
gttggcagggctagctacaacgaataggcct

SEQ ID NO: 7908 - DNA, 31 bp, artificial sequence
  misc_feature: DNAzyme
gctgttggggctagctacaacgaagcatagg

SEQ ID NO: 7909 - DNA, 31 bp, artificial sequence
  misc_feature: DNAzyme
cgcggctgggctagctacaacgatggcagca

SEQ ID NO: 7910 - DNA, 31 bp, artificial sequence
  misc_feature: DNAzyme
tggcgcggggctagctacaacgatgttggca

SEQ ID NO: 7911 - DNA, 31 bp, artificial sequence
  misc_feature: DNAzyme
cgctggcgggctagctacaacgaggctgttg

SEQ ID NO: 7912 - DNA, 31 bp, artificial sequence
  misc_feature: DNAzyme
atcgctggggctagctacaacgagcggctgt

SEQ ID NO: 7913 - DNA, 31 bp, artificial sequence
  misc_feature: DNAzyme
cggcatcgggctagctacaacgatggcgcgg

SEQ ID NO: 7914 - DNA, 31 bp, artificial sequence
  misc_feature: DNAzyme
cgccggcaggctagctacaacgacgctggcg

SEQ ID NO: 7915 - DNA, 31 bp, artificial sequence
  misc_feature: DNAzyme
ggcgccggggctagctacaacgaatcgctgg

SEQ ID NO: 7916 - DNA, 31 bp, artificial sequence
  misc_feature: DNAzyme
cgtgggcgggctagctacaacgacggcatcg

SEQ ID NO: 7917 - DNA, 31 bp, artificial sequence
  misc_feature: DNAzyme
ttcgtgggggctagctacaacgagccggcat

SEQ ID NO: 7918 - DNA, 31 bp, artificial sequence
  misc_feature: DNAzyme
ggccttcgggctagctacaacgagggcgccg

SEQ ID NO: 7919 - DNA, 31 bp, artificial sequence
  misc_feature: DNAzyme
cgtttcggggctagctacaacgacttcgtgg

SEQ ID NO: 7920 - DNA, 31 bp, artificial sequence
  misc_feature: DNAzyme
cagagccgggctagctacaacgattcggcct

SEQ ID NO: 7921 - DNA, 31 bp, artificial sequence
  misc_feature: DNAzyme
ccccagagggctagctacaacgacgtttcgg

SEQ ID NO: 7922 - DNA, 31 bp, artificial sequence
  misc_feature: DNAzyme
ccaactcgggctagctacaacgatcccccca

SEQ ID NO: 7923 - DNA, 31 bp, artificial sequence
  misc_feature: DNAzyme
ccgcccaaggctagctacaacgatcgctccc

SEQ ID NO: 7924 - DNA, 31 bp, artificial sequence
  misc_feature: DNAzyme
ggtggccgggctagctacaacgaccaactcg

SEQ ID NO: 7925 - DNA, 31 bp, artificial sequence
  misc_feature: DNAzyme
gtgggtggggctagctacaacgacgcccaac

SEQ ID NO: 7926 - DNA, 31 bp, artificial sequence
  misc_feature: DNAzyme
agggtgggggctagctacaacgaggccgccc

SEQ ID NO: 7927 - DNA, 31 bp, artificial sequence
  misc_feature: DNAzyme
tgggagggggctagctacaacgagggtggcc

SEQ ID NO: 7928 - DNA, 31 bp, artificial sequence
  misc_feature: DNAzyme
gttcaacaggctagctacaacgacttgggag

SEQ ID NO: 7929 - DNA, 31 bp, artificial sequence
  misc_feature: DNAzyme
ctgttcaaggctagctacaacgaatcttggg

SEQ ID NO: 7930 - DNA, 31 bp, artificial sequence
  misc_feature: DNAzyme
ccctcctgggctagctacaacgatcaacatc

SEQ ID NO: 7931 - DNA, 31 bp, artificial sequence
  misc_feature: DNAzyme
ccaaagcaggctagctacaacgacctcctgt

SEQ ID NO: 7932 - DNA, 31 bp, artificial sequence
  misc_feature: DNAzyme
acccaaagggctagctacaacgaaccctcct

SEQ ID NO: 7933 - DNA, 31 bp, artificial sequence
  misc_feature: DNAzyme
gctcaccaggctagctacaacgaccaaagca

SEQ ID NO: 7934 - DNA, 31 bp, artificial sequence
  misc_feature: DNAzyme
cccgctcaggctagctacaacgacacccaaa

SEQ ID NO: 7935 - DNA, 31 bp, artificial sequence
  misc_feature: DNAzyme
ccagcccgggctagctacaacgatcaccacc

SEQ ID NO: 7936 - DNA, 31 bp, artificial sequence
  misc_feature: DNAzyme
atcaccagggctagctacaacgaccgctcac

SEQ ID NO: 7937 - DNA, 31 bp, artificial sequence
  misc_feature: DNAzyme
ctccatcaggctagctacaacgacagcccgc

SEQ ID NO: 7938 - DNA, 31 bp, artificial sequence
  misc_feature: DNAzyme
agcctccaggctagctacaacgacaccagcc

SEQ ID NO: 7939 - DNA, 31 bp, artificial sequence
  misc_feature: DNAzyme
attcacagggctagctacaacgactccatca

SEQ ID NO: 7940 - DNA, 31 bp, artificial sequence
  misc_feature: DNAzyme
ggcattcaggctagctacaacgaagcctcca

SEQ ID NO: 7941 - DNA, 31 bp, artificial sequence
  misc_feature: DNAzyme
tgatggcaggctagctacaacgatcacagcc

SEQ ID NO: 7942 - DNA, 31 bp, artificial sequence
  misc_feature: DNAzyme
attgatggggctagctacaacgaattcacag

SEQ ID NO: 7943 - DNA, 31 bp, artificial sequence
  misc_feature: DNAzyme
atcattgaggctagctacaacgaggcattca

SEQ ID NO: 7944 - DNA, 31 bp, artificial sequence
  misc_feature: DNAzyme
tagcatcaggctagctacaacgatgatggca

SEQ ID NO: 7945 - DNA, 31 bp, artificial sequence
  misc_feature: DNAzyme
cgatagcaggctagctacaacgacattgatg

SEQ ID NO: 7946 - DNA, 31 bp, artificial sequence
  misc_feature: DNAzyme
cgcgatagggctagctacaacgaatcattga

SEQ ID NO: 7947 - DNA, 31 bp, artificial sequence
  misc_feature: DNAzyme
ccccgcgaggctagctacaacgaagcatcat

SEQ ID NO: 7948 - DNA, 31 bp, artificial sequence
  misc_feature: DNAzyme
gaaccccgggctagctacaacgagatagcat

SEQ ID NO: 7949 - DNA, 31 bp, artificial sequence
  misc_feature: DNAzyme
cctgggaaggctagctacaacgacccgcgat

SEQ ID NO: 7950 - DNA, 31 bp, artificial sequence
  misc_feature: DNAzyme
ccactctgggctagctacaacgactgggaac

SEQ ID NO: 7951 - DNA, 31 bp, artificial sequence
  misc_feature: DNAzyme
cttgtccaggctagctacaacgatctgcctg

SEQ ID NO: 7952 - DNA, 31 bp, artificial sequence
  misc_feature: DNAzyme
caggcttgggctagctacaacgaccactctg

SEQ ID NO: 7953 - DNA, 31 bp, artificial sequence
  misc_feature: DNAzyme
ctagcaggggctagctacaacgattgtccac

SEQ ID NO: 7954 - DNA, 31 bp, artificial sequence
  misc_feature: DNAzyme
gtacctagggctagctacaacgaaggcttgt

SEQ ID NO: 7955 - DNA, 31 bp, artificial sequence
  misc_feature: DNAzyme
atacagtaggctagctacaacgactagcagg

SEQ ID NO: 7956 - DNA, 31 bp, artificial sequence
  misc_feature: DNAzyme
ggatacagggctagctacaacgaacctagca

SEQ ID NO: 7957 - DNA, 31 bp, artificial sequence
  misc_feature: DNAzyme
gcgggataggctagctacaacgaagtaccta

SEQ ID NO: 7958 - DNA, 31 bp, artificial sequence
  misc_feature: DNAzyme
cagcgggaggctagctacaacgaacagtacc

SEQ ID NO: 7959 - DNA, 31 bp, artificial sequence
  misc_feature: DNAzyme
ttcatcagggctagctacaacgagggataca

SEQ ID NO: 7960 - DNA, 31 bp, artificial sequence
  misc_feature: DNAzyme
gaatttcaggctagctacaacgacagcggga

SEQ ID NO: 7961 - DNA, 31 bp, artificial sequence
  misc_feature: DNAzyme
atgtggaaggctagctacaacgattcatcag

SEQ ID NO: 7962 - DNA, 31 bp, artificial sequence
  misc_feature: DNAzyme
agcacatgggctagctacaacgaggaatttc

SEQ ID NO: 7963 - DNA, 31 bp, artificial sequence
  misc_feature: DNAzyme
gaagcacaggctagctacaacgagtggaatt

SEQ ID NO: 7964 - DNA, 31 bp, artificial sequence
  misc_feature: DNAzyme
gcgaagcaggctagctacaacgaatgtggaa

SEQ ID NO: 7965 - DNA, 31 bp, artificial sequence
  misc_feature: DNAzyme
gggcgaagggctagctacaacgaacatgtgg

SEQ ID NO: 7966 - DNA, 31 bp, artificial sequence
  misc_feature: DNAzyme
tttctgggggctagctacaacgagaagcaca

SEQ ID NO: 7967 - DNA, 31 bp, artificial sequence
  misc_feature: DNAzyme
ccttgaggggctagctacaacgatttctggg

SEQ ID NO: 7968 - DNA, 31 bp, artificial sequence
  misc_feature: DNAzyme
gtggcgagggctagctacaacgaccttgagg

SEQ ID NO: 7969 - DNA, 31 bp, artificial sequence
  misc_feature: DNAzyme
ccaagtggggctagctacaacgagagccctt

SEQ ID NO: 7970 - DNA, 31 bp, artificial sequence
  misc_feature: DNAzyme
aatccaagggctagctacaacgaggcgagcc

SEQ ID NO: 7971 - DNA, 31 bp, artificial sequence
  misc_feature: DNAzyme
tggtggaaggctagctacaacgaccaagtgg

SEQ ID NO: 7972 - DNA, 31 bp, artificial sequence
  misc_feature: DNAzyme
tcccgtggggctagctacaacgaggaatcca

SEQ ID NO: 7973 - DNA, 31 bp, artificial sequence
  misc_feature: DNAzyme
tgctcccgggctagctacaacgaggtggaat

SEQ ID NO: 7974 - DNA, 31 bp, artificial sequence
  misc_feature: DNAzyme
ggctgctgggctagctacaacgatcccgtgg

SEQ ID NO: 7975 - DNA, 31 bp, artificial sequence
  misc_feature: DNAzyme
ggaggctgggctagctacaacgatgctcccg

SEQ ID NO: 7976 - DNA, 31 bp, artificial sequence
  misc_feature: DNAzyme
agcggaggggctagctacaacgatgctgctc

SEQ ID NO: 7977 - DNA, 31 bp, artificial sequence
  misc_feature: DNAzyme
caaccaagggctagctacaacgaggaggctg

SEQ ID NO: 7978 - DNA, 31 bp, artificial sequence
  misc_feature: DNAzyme
gccaccaaggctagctacaacgacaagcgga

SEQ ID NO: 7979 - DNA, 31 bp, artificial sequence
  misc_feature: DNAzyme
aacagccaggctagctacaacgacaaccaag

SEQ ID NO: 7980 - DNA, 31 bp, artificial sequence
  misc_feature: DNAzyme
gcaaacagggctagctacaacgacaccaacc

SEQ ID NO: 7981 - DNA, 31 bp, artificial sequence
  misc_feature: DNAzyme
gctgcaaaggctagctacaacgaagccacca

SEQ ID NO: 7982 - DNA, 31 bp, artificial sequence
  misc_feature: DNAzyme
gattgctgggctagctacaacgaaaacagcc

SEQ ID NO: 7983 - DNA, 31 bp, artificial sequence
  misc_feature: DNAzyme
tcggattgggctagctacaacgatgcaaaca

SEQ ID NO: 7984 - DNA, 31 bp, artificial sequence
  misc_feature: DNAzyme
cgctcggaggctagctacaacgatgctgcaa

SEQ ID NO: 7985 - DNA, 31 bp, artificial sequence
  misc_feature: DNAzyme
agaaggcgggctagctacaacgatcggattg

SEQ ID NO: 7986 - DNA, 31 bp, artificial sequence
  misc_feature: DNAzyme
gcagaaggggctagctacaacgagctcggat

SEQ ID NO: 7987 - DNA, 31 bp, artificial sequence
  misc_feature: DNAzyme
agttcaagggctagctacaacgaagaaggcg

SEQ ID NO: 7988 - DNA, 31 bp, artificial sequence
  misc_feature: DNAzyme
ccgagcagggctagctacaacgatcaagcag

SEQ ID NO: 7989 - DNA, 31 bp, artificial sequence
  misc_feature: DNAzyme
tcgccgagggctagctacaacgaagttcaag

SEQ ID NO: 7990 - DNA, 31 bp, artificial sequence
  misc_feature: DNAzyme
gcagctcgggctagctacaacgacgagcagt

SEQ ID NO: 7991 - DNA, 31 bp, artificial sequence
  misc_feature: DNAzyme
ggatgcagggctagctacaacgatcgccgag

SEQ ID NO: 7992 - DNA, 31 bp, artificial sequence
  misc_feature: DNAzyme
aggggatgggctagctacaacgaagctcgcc

SEQ ID NO: 7993 - DNA, 31 bp, artificial sequence
  misc_feature: DNAzyme
acaggggaggctagctacaacgagcagctcg

SEQ ID NO: 7994 - DNA, 31 bp, artificial sequence
  misc_feature: DNAzyme
acatcgaaggctagctacaacgaaggggatg

SEQ ID NO: 7995 - DNA, 31 bp, artificial sequence
  misc_feature: DNAzyme
cccttacaggctagctacaacgacgaacagg

SEQ ID NO: 7996 - DNA, 31 bp, artificial sequence
  misc_feature: DNAzyme
ctcccttaggctagctacaacgaatcgaaca

SEQ ID NO: 7997 - DNA, 31 bp, artificial sequence
  misc_feature: DNAzyme
gcctcacaggctagctacaacgactccctta

SEQ ID NO: 7998 - DNA, 31 bp, artificial sequence
  misc_feature: DNAzyme
gtgcctcaggctagctacaacgaacctccct

SEQ ID NO: 7999 - DNA, 31 bp, artificial sequence
  misc_feature: DNAzyme
ggagtgtgggctagctacaacgactcacacc

SEQ ID NO: 8000 - DNA, 31 bp, artificial sequence
  misc_feature: DNAzyme
gaggagtgggctagctacaacgagcctcaca

SEQ ID NO: 8001 - DNA, 31 bp, artificial sequence
  misc_feature: DNAzyme
tggaggagggctagctacaacgagtgcctca

SEQ ID NO: 8002 - DNA, 31 bp, artificial sequence
  misc_feature: DNAzyme
cgatgagaggctagctacaacgaggaggagt

SEQ ID NO: 8003 - DNA, 31 bp, artificial sequence
  misc_feature: DNAzyme
gagttcgaggctagctacaacgagagatgga

SEQ ID NO: 8004 - DNA, 31 bp, artificial sequence
  misc_feature: DNAzyme
accaggagggctagctacaacgatcgatgag

SEQ ID NO: 8005 - DNA, 31 bp, artificial sequence
  misc_feature: DNAzyme
gctctctaggctagctacaacgacaggagtt

SEQ ID NO: 8006 - DNA, 31 bp, artificial sequence
  misc_feature: DNAzyme
cagggaggggctagctacaacgatctctacc

SEQ ID NO: 8007 - DNA, 31 bp, artificial sequence
  misc_feature: DNAzyme
atccccgaggctagctacaacgaagggaggc

SEQ ID NO: 8008 - DNA, 31 bp, artificial sequence
  misc_feature: DNAzyme
ggctgttaggctagctacaacgaccccgaca

SEQ ID NO: 8009 - DNA, 31 bp, artificial sequence
  misc_feature: DNAzyme
gccggctgggctagctacaacgatatccccg

SEQ ID NO: 8010 - DNA, 31 bp, artificial sequence
  misc_feature: DNAzyme
gaagccggggctagctacaacgatgttatcc

SEQ ID NO: 8011 - DNA, 31 bp, artificial sequence
  misc_feature: DNAzyme
ccgggaagggctagctacaacgacggctgtt

SEQ ID NO: 8012 - DNA, 31 bp, artificial sequence
  misc_feature: DNAzyme
tcatcttgggctagctacaacgaccgggaag

SEQ ID NO: 8013 - DNA, 31 bp, artificial sequence
  misc_feature: DNAzyme
cagaatcaggctagctacaacgacttgtccg

SEQ ID NO: 8014 - DNA, 31 bp, artificial sequence
  misc_feature: DNAzyme
gggcagaaggctagctacaacgacatcttgt

SEQ ID NO: 8015 - DNA, 31 bp, artificial sequence
  misc_feature: DNAzyme
attgtgggggctagctacaacgaagaatcat

SEQ ID NO: 8016 - DNA, 31 bp, artificial sequence
  misc_feature: DNAzyme
ggtcattgggctagctacaacgagggcagaa

SEQ ID NO: 8017 - DNA, 31 bp, artificial sequence
  misc_feature: DNAzyme
cgtggtcaggctagctacaacgatgtgggca

SEQ ID NO: 8018 - DNA, 31 bp, artificial sequence
  misc_feature: DNAzyme
cagcgtggggctagctacaacgacattgtgg

SEQ ID NO: 8019 - DNA, 31 bp, artificial sequence
  misc_feature: DNAzyme
aggcagcgggctagctacaacgaggtcattg

SEQ ID NO: 8020 - DNA, 31 bp, artificial sequence
  misc_feature: DNAzyme
acaggcagggctagctacaacgagtggtcat

SEQ ID NO: 8021 - DNA, 31 bp, artificial sequence
  misc_feature: DNAzyme
acgacaggggctagctacaacgaagcgtggt

SEQ ID NO: 8022 - DNA, 31 bp, artificial sequence
  misc_feature: DNAzyme
cctgacgaggctagctacaacgaaggcagcg

SEQ ID NO: 8023 - DNA, 31 bp, artificial sequence
  misc_feature: DNAzyme
ttgcctgaggctagctacaacgagacaggca

SEQ ID NO: 8024 - DNA, 31 bp, artificial sequence
  misc_feature: DNAzyme
gcgtattgggctagctacaacgactgacgac

SEQ ID NO: 8025 - DNA, 31 bp, artificial sequence
  misc_feature: DNAzyme
accgcgtaggctagctacaacgatgcctgac

SEQ ID NO: 8026 - DNA, 31 bp, artificial sequence
  misc_feature: DNAzyme
tgaccgcgggctagctacaacgaattgcctg

SEQ ID NO: 8027 - DNA, 31 bp, artificial sequence
  misc_feature: DNAzyme
tctgaccgggctagctacaacgagtattgcc

SEQ ID NO: 8028 - DNA, 31 bp, artificial sequence
  misc_feature: DNAzyme
agctctgaggctagctacaacgacgcgtatt

SEQ ID NO: 8029 - DNA, 31 bp, artificial sequence
  misc_feature: DNAzyme
cctggcagggctagctacaacgatctgaccg

SEQ ID NO: 8030 - DNA, 31 bp, artificial sequence
  misc_feature: DNAzyme
cgtcctggggctagctacaacgaagctctga

SEQ ID NO: 8031 - DNA, 31 bp, artificial sequence
  misc_feature: DNAzyme
aggtggcgggctagctacaacgacctggcag

SEQ ID NO: 8032 - DNA, 31 bp, artificial sequence
  misc_feature: DNAzyme
gtaggtggggctagctacaacgagtcctggc

SEQ ID NO: 8033 - DNA, 31 bp, artificial sequence
  misc_feature: DNAzyme
ctagtaggggctagctacaacgaggcgtcct

SEQ ID NO: 8034 - DNA, 31 bp, artificial sequence
  misc_feature: DNAzyme
ggtgctagggctagctacaacgaaggtggcg

SEQ ID NO: 8035 - DNA, 31 bp, artificial sequence
  misc_feature: DNAzyme
cctgggtgggctagctacaacgatagtaggt

SEQ ID NO: 8036 - DNA, 31 bp, artificial sequence
  misc_feature: DNAzyme
cacctgggggctagctacaacgagctagtag

SEQ ID NO: 8037 - DNA, 31 bp, artificial sequence
  misc_feature: DNAzyme
caccagcaggctagctacaacgactgggtgc

SEQ ID NO: 8038 - DNA, 31 bp, artificial sequence
  misc_feature: DNAzyme
gtcaccagggctagctacaacgaacctgggt

SEQ ID NO: 8039 - DNA, 31 bp, artificial sequence
  misc_feature: DNAzyme
ggtcgtcaggctagctacaacgacagcacct

SEQ ID NO: 8040 - DNA, 31 bp, artificial sequence
  misc_feature: DNAzyme
ggaggtcgggctagctacaacgacaccagca

SEQ ID NO: 8041 - DNA, 31 bp, artificial sequence
  misc_feature: DNAzyme
cctggaggggctagctacaacgacgtcacca

SEQ ID NO: 8042 - DNA, 31 bp, artificial sequence
  misc_feature: DNAzyme
tcggctgaggctagctacaacgactggaggt

SEQ ID NO: 8043 - DNA, 31 bp, artificial sequence
  misc_feature: DNAzyme
catgtcggggctagctacaacgatgacctgg

SEQ ID NO: 8044 - DNA, 31 bp, artificial sequence
  misc_feature: DNAzyme
catgcatgggctagctacaacgacggctgac

SEQ ID NO: 8045 - DNA, 31 bp, artificial sequence
  misc_feature: DNAzyme
gacatgcaggctagctacaacgagtcggctg

SEQ ID NO: 8046 - DNA, 31 bp, artificial sequence
  misc_feature: DNAzyme
atgacatgggctagctacaacgaatgtcggc

SEQ ID NO: 8047 - DNA, 31 bp, artificial sequence
  misc_feature: DNAzyme
tcatgacaggctagctacaacgagcatgtcg

SEQ ID NO: 8048 - DNA, 31 bp, artificial sequence
  misc_feature: DNAzyme
catcatgaggctagctacaacgaatgcatgt

SEQ ID NO: 8049 - DNA, 31 bp, artificial sequence
  misc_feature: DNAzyme
atacatcaggctagctacaacgagacatgca

SEQ ID NO: 8050 - DNA, 31 bp, artificial sequence
  misc_feature: DNAzyme
caaatacaggctagctacaacgacatgacat

SEQ ID NO: 8051 - DNA, 31 bp, artificial sequence
  misc_feature: DNAzyme
accaaataggctagctacaacgaatcatgac

SEQ ID NO: 8052 - DNA, 31 bp, artificial sequence
  misc_feature: DNAzyme
taaccaaaggctagctacaacgaacatcatg

SEQ ID NO: 8053 - DNA, 31 bp, artificial sequence
  misc_feature: DNAzyme
ccccataaggctagctacaacgacaaataca

SEQ ID NO: 8054 - DNA, 31 bp, artificial sequence
  misc_feature: DNAzyme
acaccccaggctagctacaacgaaaccaaat

SEQ ID NO: 8055 - DNA, 31 bp, artificial sequence
  misc_feature: DNAzyme
ctcacacaggctagctacaacgacccataac

SEQ ID NO: 8056 - DNA, 31 bp, artificial sequence
  misc_feature: DNAzyme
ccctcacaggctagctacaacgaaccccata

SEQ ID NO: 8057 - DNA, 31 bp, artificial sequence
  misc_feature: DNAzyme
caccctcaggctagctacaacgaacacccca

SEQ ID NO: 8058 - DNA, 31 bp, artificial sequence
  misc_feature: DNAzyme
tgatgtcaggctagctacaacgacctcacac

SEQ ID NO: 8059 - DNA, 31 bp, artificial sequence
  misc_feature: DNAzyme
aaatgatgggctagctacaacgacaccctca

SEQ ID NO: 8060 - DNA, 31 bp, artificial sequence
  misc_feature: DNAzyme
caaaatgaggctagctacaacgagtcaccct

SEQ ID NO: 8061 - DNA, 31 bp, artificial sequence
  misc_feature: DNAzyme
gtccaaaaggctagctacaacgagatgtcac

SEQ ID NO: 8062 - DNA, 31 bp, artificial sequence
  misc_feature: DNAzyme
aggagccgggctagctacaacgaccaaaatg

SEQ ID NO: 8063 - DNA, 31 bp, artificial sequence
  misc_feature: DNAzyme
gctaggagggctagctacaacgacgtccaaa

SEQ ID NO: 8064 - DNA, 31 bp, artificial sequence
  misc_feature: DNAzyme
tgtataggggctagctacaacgataggagcc

SEQ ID NO: 8065 - DNA, 31 bp, artificial sequence
  misc_feature: DNAzyme
ctgctgtaggctagctacaacgaaggctagg

SEQ ID NO: 8066 - DNA, 31 bp, artificial sequence
  misc_feature: DNAzyme
ccctgctgggctagctacaacgaataggcta

SEQ ID NO: 8067 - DNA, 31 bp, artificial sequence
  misc_feature: DNAzyme
cacccctgggctagctacaacgatgtatagg

SEQ ID NO: 8068 - DNA, 31 bp, artificial sequence
  misc_feature: DNAzyme
ggccaacaggctagctacaacgaccctgctg

SEQ ID NO: 8069 - DNA, 31 bp, artificial sequence
  misc_feature: DNAzyme
cgggccaaggctagctacaacgaacccctgc

SEQ ID NO: 8070 - DNA, 31 bp, artificial sequence
  misc_feature: DNAzyme
tacacgggggctagctacaacgacaacaccc

SEQ ID NO: 8071 - DNA, 31 bp, artificial sequence
  misc_feature: DNAzyme
acgctacaggctagctacaacgagggccaac

SEQ ID NO: 8072 - DNA, 31 bp, artificial sequence
  misc_feature: DNAzyme
ctacgctaggctagctacaacgaacgggcca

SEQ ID NO: 8073 - DNA, 31 bp, artificial sequence
  misc_feature: DNAzyme
agcctacgggctagctacaacgatacacggg

SEQ ID NO: 8074 - DNA, 31 bp, artificial sequence
  misc_feature: DNAzyme
aaagcctaggctagctacaacgagctacacg

SEQ ID NO: 8075 - DNA, 31 bp, artificial sequence
  misc_feature: DNAzyme
ggctaaagggctagctacaacgactacgcta

SEQ ID NO: 8076 - DNA, 31 bp, artificial sequence
  misc_feature: DNAzyme
tcacacggggctagctacaacgataaagcct

SEQ ID NO: 8077 - DNA, 31 bp, artificial sequence
  misc_feature: DNAzyme
gtctcacaggctagctacaacgaggctaaag

SEQ ID NO: 8078 - DNA, 31 bp, artificial sequence
  misc_feature: DNAzyme
gtgtctcaggctagctacaacgaacggctaa

SEQ ID NO: 8079 - DNA, 31 bp, artificial sequence
  misc_feature: DNAzyme
tggaagtgggctagctacaacgactcacacg

SEQ ID NO: 8080 - DNA, 31 bp, artificial sequence
  misc_feature: DNAzyme
tgtggaagggctagctacaacgagtctcaca

SEQ ID NO: 8081 - DNA, 31 bp, artificial sequence
  misc_feature: DNAzyme
atcaaatgggctagctacaacgaggaagtgt

SEQ ID NO: 8082 - DNA, 31 bp, artificial sequence
  misc_feature: DNAzyme
ggatcaaaggctagctacaacgagtggaagt

SEQ ID NO: 8083 - DNA, 31 bp, artificial sequence
  misc_feature: DNAzyme
tcgtgggaggctagctacaacgacaaatgtg

SEQ ID NO: 8084 - DNA, 31 bp, artificial sequence
  misc_feature: DNAzyme
ccccatcgggctagctacaacgagggatcaa

SEQ ID NO: 8085 - DNA, 31 bp, artificial sequence
  misc_feature: DNAzyme
cacccccaggctagctacaacgacgtgggat

SEQ ID NO: 8086 - DNA, 31 bp, artificial sequence
  misc_feature: DNAzyme
aggctccaggctagctacaacgaccccatcg

SEQ ID NO: 8087 - DNA, 31 bp, artificial sequence
  misc_feature: DNAzyme
ggctcaggggctagctacaacgatccacccc

SEQ ID NO: 8088 - DNA, 31 bp, artificial sequence
  misc_feature: DNAzyme
cgccagggggctagctacaacgatcaggctc

SEQ ID NO: 8089 - DNA, 31 bp, artificial sequence
  misc_feature: DNAzyme
agtgtgcgggctagctacaacgacagggctc

SEQ ID NO: 8090 - DNA, 31 bp, artificial sequence
  misc_feature: DNAzyme
acagtgtgggctagctacaacgagccagggc

SEQ ID NO: 8091 - DNA, 31 bp, artificial sequence
  misc_feature: DNAzyme
ccacagtgggctagctacaacgagcgccagg

SEQ ID NO: 8092 - DNA, 31 bp, artificial sequence
  misc_feature: DNAzyme
agccacagggctagctacaacgagtgcgcca

SEQ ID NO: 8093 - DNA, 31 bp, artificial sequence
  misc_feature: DNAzyme
ccaagccaggctagctacaacgaagtgtgcg

SEQ ID NO: 8094 - DNA, 31 bp, artificial sequence
  misc_feature: DNAzyme
ataccaagggctagctacaacgacacagtgt

SEQ ID NO: 8095 - DNA, 31 bp, artificial sequence
  misc_feature: DNAzyme
gtagcataggctagctacaacgacaagccac

SEQ ID NO: 8096 - DNA, 31 bp, artificial sequence
  misc_feature: DNAzyme
tggtagcaggctagctacaacgaaccaagcc

SEQ ID NO: 8097 - DNA, 31 bp, artificial sequence
  misc_feature: DNAzyme
cctggtagggctagctacaacgaataccaag

SEQ ID NO: 8098 - DNA, 31 bp, artificial sequence
  misc_feature: DNAzyme
ctacctggggctagctacaacgaagcatacc

SEQ ID NO: 8099 - DNA, 31 bp, artificial sequence
  misc_feature: DNAzyme
ctcccctaggctagctacaacgactggtagc

SEQ ID NO: 8100 - DNA, 31 bp, artificial sequence
  misc_feature: DNAzyme
ggagaaaaggctagctacaacgactccccta

SEQ ID NO: 8101 - DNA, 31 bp, artificial sequence
  misc_feature: DNAzyme
caagcaggggctagctacaacgaaggagaaa

SEQ ID NO: 8102 - DNA, 31 bp, artificial sequence
  misc_feature: DNAzyme
agaccaagggctagctacaacgaaggcagga

SEQ ID NO: 8103 - DNA, 31 bp, artificial sequence
  misc_feature: DNAzyme
gtcccagaggctagctacaacgacaagcagg

SEQ ID NO: 8104 - DNA, 31 bp, artificial sequence
  misc_feature: DNAzyme
acttcttgggctagctacaacgacccagacc

SEQ ID NO: 8105 - DNA, 31 bp, artificial sequence
  misc_feature: DNAzyme
gatgcccaggctagctacaacgattcttgtc

SEQ ID NO: 8106 - DNA, 31 bp, artificial sequence
  misc_feature: DNAzyme
catagatgggctagctacaacgaccacttct

SEQ ID NO: 8107 - DNA, 31 bp, artificial sequence
  misc_feature: DNAzyme
cacatagaggctagctacaacgagcccactt

SEQ ID NO: 8108 - DNA, 31 bp, artificial sequence
  misc_feature: DNAzyme
cacccacaggctagctacaacgaagatgccc

SEQ ID NO: 8109 - DNA, 31 bp, artificial sequence
  misc_feature: DNAzyme
ctcacccaggctagctacaacgaatagatgc

SEQ ID NO: 8110 - DNA, 31 bp, artificial sequence
  misc_feature: DNAzyme
aggcctcaggctagctacaacgaccacatag

SEQ ID NO: 8111 - DNA, 31 bp, artificial sequence
  misc_feature: DNAzyme
ttcacaggggctagctacaacgactcaccca

SEQ ID NO: 8112 - DNA, 31 bp, artificial sequence
  misc_feature: DNAzyme
tgtcttcaggctagctacaacgaaggcctca

SEQ ID NO: 8113 - DNA, 31 bp, artificial sequence
  misc_feature: DNAzyme
ggagggtgggctagctacaacgacttcacag

SEQ ID NO: 8114 - DNA, 31 bp, artificial sequence
  misc_feature: DNAzyme
tgggagggggctagctacaacgagtcttcac

SEQ ID NO: 8115 - DNA, 31 bp, artificial sequence
  misc_feature: DNAzyme
atctggagggctagctacaacgatctgggag

SEQ ID NO: 8116 - DNA, 31 bp, artificial sequence
  misc_feature: DNAzyme
caggaccaggctagctacaacgactggagtt

SEQ ID NO: 8117 - DNA, 31 bp, artificial sequence
  misc_feature: DNAzyme
tgccaggaggctagctacaacgacatctgga

SEQ ID NO: 8118 - DNA, 31 bp, artificial sequence
  misc_feature: DNAzyme
cccttctgggctagctacaacgacaggacca

SEQ ID NO: 8119 - DNA, 31 bp, artificial sequence
  misc_feature: DNAzyme
cagggttgggctagctacaacgaccttctgc

SEQ ID NO: 8120 - DNA, 31 bp, artificial sequence
  misc_feature: DNAzyme
caccagggggctagctacaacgatgcccttc

SEQ ID NO: 8121 - DNA, 31 bp, artificial sequence
  misc_feature: DNAzyme
taaatacaggctagctacaacgacagggttg

SEQ ID NO: 8122 - DNA, 31 bp, artificial sequence
  misc_feature: DNAzyme
cctaaataggctagctacaacgaaccagggt

SEQ ID NO: 8123 - DNA, 31 bp, artificial sequence
  misc_feature: DNAzyme
tacctaaaggctagctacaacgaacaccagg

SEQ ID NO: 8124 - DNA, 31 bp, artificial sequence
  misc_feature: DNAzyme
cgggcttaggctagctacaacgactaaatac

SEQ ID NO: 8125 - DNA, 31 bp, artificial sequence
  misc_feature: DNAzyme
gttgcgggggctagctacaacgattacctaa

SEQ ID NO: 8126 - DNA, 31 bp, artificial sequence
  misc_feature: DNAzyme
ttaggttgggctagctacaacgagggcttac

SEQ ID NO: 8127 - DNA, 31 bp, artificial sequence
  misc_feature: DNAzyme
ccgttaggggctagctacaacgatgcgggct

SEQ ID NO: 8128 - DNA, 31 bp, artificial sequence
  misc_feature: DNAzyme
gacctccgggctagctacaacgataggttgc

SEQ ID NO: 8129 - DNA, 31 bp, artificial sequence
  misc_feature: DNAzyme
cgccgagaggctagctacaacgactccgtta

SEQ ID NO: 8130 - DNA, 31 bp, artificial sequence
  misc_feature: DNAzyme
cacgcccgggctagctacaacgacgagacct

SEQ ID NO: 8131 - DNA, 31 bp, artificial sequence
  misc_feature: DNAzyme
agctcacgggctagctacaacgaccgccgag

SEQ ID NO: 8132 - DNA, 31 bp, artificial sequence
  misc_feature: DNAzyme
cgagctcaggctagctacaacgagcccgccg

SEQ ID NO: 8133 - DNA, 31 bp, artificial sequence
  misc_feature: DNAzyme
ggtacgagggctagctacaacgatcacgccc

SEQ ID NO: 8134 - DNA, 31 bp, artificial sequence
  misc_feature: DNAzyme
gcttggtaggctagctacaacgagagctcac

SEQ ID NO: 8135 - DNA, 31 bp, artificial sequence
  misc_feature: DNAzyme
gtgcttggggctagctacaacgaacgagctc

SEQ ID NO: 8136 - DNA, 31 bp, artificial sequence
  misc_feature: DNAzyme
gggatgtgggctagctacaacgattggtacg

SEQ ID NO: 8137 - DNA, 31 bp, artificial sequence
  misc_feature: DNAzyme
gcgggatgggctagctacaacgagcttggta

SEQ ID NO: 8138 - DNA, 31 bp, artificial sequence
  misc_feature: DNAzyme
acgcgggaggctagctacaacgagtgcttgg

SEQ ID NO: 8139 - DNA, 31 bp, artificial sequence
  misc_feature: DNAzyme
ctatgacgggctagctacaacgagggatgtg

SEQ ID NO: 8140 - DNA, 31 bp, artificial sequence
  misc_feature: DNAzyme
tgctatgaggctagctacaacgagcgggatg

SEQ ID NO: 8141 - DNA, 31 bp, artificial sequence
  misc_feature: DNAzyme
gagtgctaggctagctacaacgagacgcggg

SEQ ID NO: 8142 - DNA, 31 bp, artificial sequence
  misc_feature: DNAzyme
tgtgagtgggctagctacaacgatatgacgc

SEQ ID NO: 8143 - DNA, 31 bp, artificial sequence
  misc_feature: DNAzyme
tgtgtgagggctagctacaacgagctatgac

SEQ ID NO: 8144 - DNA, 31 bp, artificial sequence
  misc_feature: DNAzyme
gtcctgtgggctagctacaacgagagtgcta

SEQ ID NO: 8145 - DNA, 31 bp, artificial sequence
  misc_feature: DNAzyme
cggtcctgggctagctacaacgagtgagtgc

SEQ ID NO: 8146 - DNA, 31 bp, artificial sequence
  misc_feature: DNAzyme
ctcctcggggctagctacaacgacctgtgtg

SEQ ID NO: 8147 - DNA, 31 bp, artificial sequence
  misc_feature: DNAzyme
atgttcgaggctagctacaacgatcctcggt

SEQ ID NO: 8148 - DNA, 31 bp, artificial sequence
  misc_feature: DNAzyme
cgggcatgggctagctacaacgatcgactcc

SEQ ID NO: 8149 - DNA, 31 bp, artificial sequence
  misc_feature: DNAzyme
ttcgggcaggctagctacaacgagttcgact

SEQ ID NO: 8150 - DNA, 31 bp, artificial sequence
  misc_feature: DNAzyme
ccttcgggggctagctacaacgaatgttcga

SEQ ID NO: 8151 - DNA, 31 bp, artificial sequence
  misc_feature: DNAzyme
gagagcggggctagctacaacgacttcgggc

SEQ ID NO: 8152 - DNA, 31 bp, artificial sequence
  misc_feature: DNAzyme
caggagagggctagctacaacgaggccttcg

SEQ ID NO: 8153 - DNA, 31 bp, artificial sequence
  misc_feature: DNAzyme
gtttgtgaggctagctacaacgatccaggag

SEQ ID NO: 8154 - DNA, 31 bp, artificial sequence
  misc_feature: DNAzyme
caggtttgggctagctacaacgagactccag

SEQ ID NO: 8155 - DNA, 31 bp, artificial sequence
  misc_feature: DNAzyme
tatacaggggctagctacaacgattgtgact

SEQ ID NO: 8156 - DNA, 31 bp, artificial sequence
  misc_feature: DNAzyme
ggcatataggctagctacaacgaaggtttgt

SEQ ID NO: 8157 - DNA, 31 bp, artificial sequence
  misc_feature: DNAzyme
gaggcataggctagctacaacgaacaggttt

SEQ ID NO: 8158 - DNA, 31 bp, artificial sequence
  misc_feature: DNAzyme
gagaggcaggctagctacaacgaatacaggt

SEQ ID NO: 8159 - DNA, 31 bp, artificial sequence
  misc_feature: DNAzyme
aggagaggggctagctacaacgaatatacag

SEQ ID NO: 8160 - DNA, 31 bp, artificial sequence
  misc_feature: DNAzyme
ggtaggggggctagctacaacgaaggagagg

SEQ ID NO: 8161 - DNA, 31 bp, artificial sequence
  misc_feature: DNAzyme
aggaccggggctagctacaacgaaggggcag

SEQ ID NO: 8162 - DNA, 31 bp, artificial sequence
  misc_feature: DNAzyme
aggtaggaggctagctacaacgacggtaggg

SEQ ID NO: 8163 - DNA, 31 bp, artificial sequence
  misc_feature: DNAzyme
aggcgaggggctagctacaacgaaggaccgg

SEQ ID NO: 8164 - DNA, 31 bp, artificial sequence
  misc_feature: DNAzyme
cgcagaggggctagctacaacgagaggtagg

SEQ ID NO: 8165 - DNA, 31 bp, artificial sequence
  misc_feature: DNAzyme
cccgctcgggctagctacaacgaagaggcga

SEQ ID NO: 8166 - DNA, 31 bp, artificial sequence
  misc_feature: DNAzyme
gtgtcccgggctagctacaacgatcgcagag

SEQ ID NO: 8167 - DNA, 31 bp, artificial sequence
  misc_feature: DNAzyme
acgcagtgggctagctacaacgacccgctcg

SEQ ID NO: 8168 - DNA, 31 bp, artificial sequence
  misc_feature: DNAzyme
agacgcagggctagctacaacgagtcccgct

SEQ ID NO: 8169 - DNA, 31 bp, artificial sequence
  misc_feature: DNAzyme
ccaagacgggctagctacaacgaagtgtccc

SEQ ID NO: 8170 - DNA, 31 bp, artificial sequence
  misc_feature: DNAzyme
ccccaagaggctagctacaacgagcagtgtc

SEQ ID NO: 8171 - DNA, 31 bp, artificial sequence
  misc_feature: DNAzyme
cgaccgtgggctagctacaacgacccaagac

SEQ ID NO: 8172 - DNA, 31 bp, artificial sequence
  misc_feature: DNAzyme
gacgaccgggctagctacaacgagccccaag

SEQ ID NO: 8173 - DNA, 31 bp, artificial sequence
  misc_feature: DNAzyme
gacgacgaggctagctacaacgacgtgcccc

SEQ ID NO: 8174 - DNA, 31 bp, artificial sequence
  misc_feature: DNAzyme
tgagacgaggctagctacaacgagaccgtgc

SEQ ID NO: 8175 - DNA, 31 bp, artificial sequence
  misc_feature: DNAzyme
cattgagaggctagctacaacgagacgaccg

SEQ ID NO: 8176 - DNA, 31 bp, artificial sequence
  misc_feature: DNAzyme
cttcaccaggctagctacaacgatgagacga

SEQ ID NO: 8177 - DNA, 31 bp, artificial sequence
  misc_feature: DNAzyme
taccttcaggctagctacaacgacattgaga

SEQ ID NO: 8178 - DNA, 31 bp, artificial sequence
  misc_feature: DNAzyme
ggaccctaggctagctacaacgacttcacca

SEQ ID NO: 8179 - DNA, 31 bp, artificial sequence
  misc_feature: DNAzyme
agcttggaggctagctacaacgacctacctt

SEQ ID NO: 8180 - DNA, 31 bp, artificial sequence
  misc_feature: DNAzyme
gacttcagggctagctacaacgattggaccc

SEQ ID NO: 8181 - DNA, 31 bp, artificial sequence
  misc_feature: DNAzyme
acagtcgaggctagctacaacgattcagctt

SEQ ID NO: 8182 - DNA, 31 bp, artificial sequence
  misc_feature: DNAzyme
ccaaacagggctagctacaacgacgacttca

SEQ ID NO: 8183 - DNA, 31 bp, artificial sequence
  misc_feature: DNAzyme
cacccaaaggctagctacaacgaagtcgact

SEQ ID NO: 8184 - DNA, 31 bp, artificial sequence
  misc_feature: DNAzyme
atgtgtcaggctagctacaacgaccaaacag

SEQ ID NO: 8185 - DNA, 31 bp, artificial sequence
  misc_feature: DNAzyme
tacatgtgggctagctacaacgacacccaaa

SEQ ID NO: 8186 - DNA, 31 bp, artificial sequence
  misc_feature: DNAzyme
aatacatgggctagctacaacgagtcaccca

SEQ ID NO: 8187 - DNA, 31 bp, artificial sequence
  misc_feature: DNAzyme
gtaatacaggctagctacaacgagtgtcacc

SEQ ID NO: 8188 - DNA, 31 bp, artificial sequence
  misc_feature: DNAzyme
ctgtaataggctagctacaacgaatgtgtca

SEQ ID NO: 8189 - DNA, 31 bp, artificial sequence
  misc_feature: DNAzyme
gactgtaaggctagctacaacgaacatgtgt

SEQ ID NO: 8190 - DNA, 31 bp, artificial sequence
  misc_feature: DNAzyme
atcgactgggctagctacaacgaaatacatg

SEQ ID NO: 8191 - DNA, 31 bp, artificial sequence
  misc_feature: DNAzyme
gtgatcgaggctagctacaacgatgtaatac

SEQ ID NO: 8192 - DNA, 31 bp, artificial sequence
  misc_feature: DNAzyme
ctcggtgaggctagctacaacgacgactgta

SEQ ID NO: 8193 - DNA, 31 bp, artificial sequence
  misc_feature: DNAzyme
tgactcggggctagctacaacgagatcgact

SEQ ID NO: 8194 - DNA, 31 bp, artificial sequence
  misc_feature: DNAzyme
gattttgaggctagctacaacgatcggtgat

SEQ ID NO: 8195 - DNA, 31 bp, artificial sequence
  misc_feature: DNAzyme
accggcgaggctagctacaacgatttgactc

SEQ ID NO: 8196 - DNA, 31 bp, artificial sequence
  misc_feature: DNAzyme
tataccggggctagctacaacgagattttga

SEQ ID NO: 8197 - DNA, 31 bp, artificial sequence
  misc_feature: DNAzyme
gggctataggctagctacaacgacggcgatt

SEQ ID NO: 8198 - DNA, 31 bp, artificial sequence
  misc_feature: DNAzyme
acgggctaggctagctacaacgaaccggcga

SEQ ID NO: 8199 - DNA, 31 bp, artificial sequence
  misc_feature: DNAzyme
atgacgggggctagctacaacgatataccgg

SEQ ID NO: 8200 - DNA, 31 bp, artificial sequence
  misc_feature: DNAzyme
tctaatgaggctagctacaacgagggctata

SEQ ID NO: 8201 - DNA, 31 bp, artificial sequence
  misc_feature: DNAzyme
cgctctaaggctagctacaacgagacgggct

SEQ ID NO: 8202 - DNA, 31 bp, artificial sequence
  misc_feature: DNAzyme
aacagacgggctagctacaacgatctaatga

SEQ ID NO: 8203 - DNA, 31 bp, artificial sequence
  misc_feature: DNAzyme
gcaacagaggctagctacaacgagctctaat

SEQ ID NO: 8204 - DNA, 31 bp, artificial sequence
  misc_feature: DNAzyme
cgtggcaaggctagctacaacgaagacgctc

SEQ ID NO: 8205 - DNA, 31 bp, artificial sequence
  misc_feature: DNAzyme
tgtcgtggggctagctacaacgaaacagacg

SEQ ID NO: 8206 - DNA, 31 bp, artificial sequence
  misc_feature: DNAzyme
cgttgtcgggctagctacaacgaggcaacag

SEQ ID NO: 8207 - DNA, 31 bp, artificial sequence
  misc_feature: DNAzyme
cgtcgttgggctagctacaacgacgtggcaa

SEQ ID NO: 8208 - DNA, 31 bp, artificial sequence
  misc_feature: DNAzyme
ggacgtcgggctagctacaacgatgtcgtgg

SEQ ID NO: 8209 - DNA, 31 bp, artificial sequence
  misc_feature: DNAzyme
cggggacgggctagctacaacgacgttgtcg

SEQ ID NO: 8210 - DNA, 31 bp, artificial sequence
  misc_feature: DNAzyme
agcggggaggctagctacaacgagtcgttgt

SEQ ID NO: 8211 - DNA, 31 bp, artificial sequence
  misc_feature: DNAzyme
ccggccagggctagctacaacgaggggacgt

SEQ ID NO: 8212 - DNA, 31 bp, artificial sequence
  misc_feature: DNAzyme
cataccggggctagctacaacgacagcgggg

SEQ ID NO: 8213 - DNA, 31 bp, artificial sequence
  misc_feature: DNAzyme
ccgtcataggctagctacaacgacggccagc

SEQ ID NO: 8214 - DNA, 31 bp, artificial sequence
  misc_feature: DNAzyme
gtccgtcaggctagctacaacgaaccggcca

SEQ ID NO: 8215 - DNA, 31 bp, artificial sequence
  misc_feature: DNAzyme
cgtgtccgggctagctacaacgacataccgg

SEQ ID NO: 8216 - DNA, 31 bp, artificial sequence
  misc_feature: DNAzyme
tcgacgtgggctagctacaacgaccgtcata

SEQ ID NO: 8217 - DNA, 31 bp, artificial sequence
  misc_feature: DNAzyme
tctcgacgggctagctacaacgagtccgtca

SEQ ID NO: 8218 - DNA, 31 bp, artificial sequence
  misc_feature: DNAzyme
ggtctcgaggctagctacaacgagtgtccgt

SEQ ID NO: 8219 - DNA, 31 bp, artificial sequence
  misc_feature: DNAzyme
taccggggggctagctacaacgactcgacgt

SEQ ID NO: 8220 - DNA, 31 bp, artificial sequence
  misc_feature: DNAzyme
gcgtattaggctagctacaacgacggggtct

SEQ ID NO: 8221 - DNA, 31 bp, artificial sequence
  misc_feature: DNAzyme
gtagcgtaggctagctacaacgataccgggg

SEQ ID NO: 8222 - DNA, 31 bp, artificial sequence
  misc_feature: DNAzyme
ctgtagcgggctagctacaacgaattaccgg

SEQ ID NO: 8223 - DNA, 31 bp, artificial sequence
  misc_feature: DNAzyme
cgctgtagggctagctacaacgagtattacc

SEQ ID NO: 8224 - DNA, 31 bp, artificial sequence
  misc_feature: DNAzyme
taacgctgggctagctacaacgaagcgtatt

SEQ ID NO: 8225 - DNA, 31 bp, artificial sequence
  misc_feature: DNAzyme
acttaacgggctagctacaacgatgtagcgt

SEQ ID NO: 8226 - DNA, 31 bp, artificial sequence
  misc_feature: DNAzyme
ggacttaaggctagctacaacgagctgtagc

SEQ ID NO: 8227 - DNA, 31 bp, artificial sequence
  misc_feature: DNAzyme
gcctcggaggctagctacaacgattaacgct

SEQ ID NO: 8228 - DNA, 31 bp, artificial sequence
  misc_feature: DNAzyme
ctgtcgggggctagctacaacgactcggact

SEQ ID NO: 8229 - DNA, 31 bp, artificial sequence
  misc_feature: DNAzyme
caaagctgggctagctacaacgacgggcctc

SEQ ID NO: 8230 - DNA, 31 bp, artificial sequence
  misc_feature: DNAzyme
ctgcaaagggctagctacaacgatgtcgggc

SEQ ID NO: 8231 - DNA, 31 bp, artificial sequence
  misc_feature: DNAzyme
gctcgctgggctagctacaacgaaaagctgt

SEQ ID NO: 8232 - DNA, 31 bp, artificial sequence
  misc_feature: DNAzyme
cgagctcgggctagctacaacgatgcaaagc

SEQ ID NO: 8233 - DNA, 31 bp, artificial sequence
  misc_feature: DNAzyme
gtgacgagggctagctacaacgatcgctgca

SEQ ID NO: 8234 - DNA, 31 bp, artificial sequence
  misc_feature: DNAzyme
aaatgtgaggctagctacaacgagagctcgc

SEQ ID NO: 8235 - DNA, 31 bp, artificial sequence
  misc_feature: DNAzyme
aagaaatgggctagctacaacgagacgagct

SEQ ID NO: 8236 - DNA, 31 bp, artificial sequence
  misc_feature: DNAzyme
agaagaaaggctagctacaacgagtgacgag

SEQ ID NO: 8237 - DNA, 31 bp, artificial sequence
  misc_feature: DNAzyme
ttctgccaggctagctacaacgatccaagaa

SEQ ID NO: 8238 - DNA, 31 bp, artificial sequence
  misc_feature: DNAzyme
atcttctgggctagctacaacgacattccaa

SEQ ID NO: 8239 - DNA, 31 bp, artificial sequence
  misc_feature: DNAzyme
gcatctcaggctagctacaacgacttctgcc

SEQ ID NO: 8240 - DNA, 31 bp, artificial sequence
  misc_feature: DNAzyme
gggaggcaggctagctacaacgactcatctt

SEQ ID NO: 8241 - DNA, 31 bp, artificial sequence
  misc_feature: DNAzyme
gggggaggggctagctacaacgaatctcatc

SEQ ID NO: 8242 - DNA, 31 bp, artificial sequence
  misc_feature: DNAzyme
cgagaccaggctagctacaacgacaaagggg

SEQ ID NO: 8243 - DNA, 31 bp, artificial sequence
  misc_feature: DNAzyme
catcgagaggctagctacaacgacatcaaag

SEQ ID NO: 8244 - DNA, 31 bp, artificial sequence
  misc_feature: DNAzyme
catccccaggctagctacaacgacgagacca

SEQ ID NO: 8245 - DNA, 31 bp, artificial sequence
  misc_feature: DNAzyme
caaagccaggctagctacaacgaccccatcg

SEQ ID NO: 8246 - DNA, 31 bp, artificial sequence
  misc_feature: DNAzyme
tggcaaagggctagctacaacgacatcccca

SEQ ID NO: 8247 - DNA, 31 bp, artificial sequence
  misc_feature: DNAzyme
ttctatggggctagctacaacgaaaagccat

SEQ ID NO: 8248 - DNA, 31 bp, artificial sequence
  misc_feature: DNAzyme
cccttctaggctagctacaacgaggcaaagc

SEQ ID NO: 8249 - DNA, 31 bp, artificial sequence
  misc_feature: DNAzyme
cggagagaggctagctacaacgaccccttct

SEQ ID NO: 8250 - DNA, 31 bp, artificial sequence
  misc_feature: DNAzyme
gtccaacaggctagctacaacgacggagaga

SEQ ID NO: 8251 - DNA, 31 bp, artificial sequence
  misc_feature: DNAzyme
ttgtccaaggctagctacaacgaaccggaga

SEQ ID NO: 8252 - DNA, 31 bp, artificial sequence
  misc_feature: DNAzyme
tagccttgggctagctacaacgaccaacacc

SEQ ID NO: 8253 - DNA, 31 bp, artificial sequence
  misc_feature: DNAzyme
ggagatagggctagctacaacgacttgtcca

SEQ ID NO: 8254 - DNA, 31 bp, artificial sequence
  misc_feature: DNAzyme
cgaggagaggctagctacaacgaagccttgt

SEQ ID NO: 8255 - DNA, 31 bp, artificial sequence
  misc_feature: DNAzyme
tcccaacaggctagctacaacgacgaggaga

SEQ ID NO: 8256 - DNA, 31 bp, artificial sequence
  misc_feature: DNAzyme
catcccaaggctagctacaacgaatcgagga

SEQ ID NO: 8257 - DNA, 31 bp, artificial sequence
  misc_feature: DNAzyme
gtgccacaggctagctacaacgacccaacat

SEQ ID NO: 8258 - DNA, 31 bp, artificial sequence
  misc_feature: DNAzyme
ccgtgccaggctagctacaacgaatcccaac

SEQ ID NO: 8259 - DNA, 31 bp, artificial sequence
  misc_feature: DNAzyme
tcaccgtgggctagctacaacgacacatccc

SEQ ID NO: 8260 - DNA, 31 bp, artificial sequence
  misc_feature: DNAzyme
ggtcaccgggctagctacaacgagccacatc

SEQ ID NO: 8261 - DNA, 31 bp, artificial sequence
  misc_feature: DNAzyme
atcggtcaggctagctacaacgacgtgccac

SEQ ID NO: 8262 - DNA, 31 bp, artificial sequence
  misc_feature: DNAzyme
gggatcggggctagctacaacgacaccgtgc

SEQ ID NO: 8263 - DNA, 31 bp, artificial sequence
  misc_feature: DNAzyme
ctccgggaggctagctacaacgacggtcacc

SEQ ID NO: 8264 - DNA, 31 bp, artificial sequence
  misc_feature: DNAzyme
ccgctacgggctagctacaacgactccggga

SEQ ID NO: 8265 - DNA, 31 bp, artificial sequence
  misc_feature: DNAzyme
caccgctaggctagctacaacgagcctccgg

SEQ ID NO: 8266 - DNA, 31 bp, artificial sequence
  misc_feature: DNAzyme
cgccaccgggctagctacaacgatacgcctc

SEQ ID NO: 8267 - DNA, 31 bp, artificial sequence
  misc_feature: DNAzyme
gctcgccaggctagctacaacgacgctacgc

SEQ ID NO: 8268 - DNA, 31 bp, artificial sequence
  misc_feature: DNAzyme
cgtgctcgggctagctacaacgacaccgcta

SEQ ID NO: 8269 - DNA, 31 bp, artificial sequence
  misc_feature: DNAzyme
tcgtcgtgggctagctacaacgatcgccacc

SEQ ID NO: 8270 - DNA, 31 bp, artificial sequence
  misc_feature: DNAzyme
gctcgtcgggctagctacaacgagctcgcca

SEQ ID NO: 8271 - DNA, 31 bp, artificial sequence
  misc_feature: DNAzyme
gcggctcgggctagctacaacgacgtgctcg

SEQ ID NO: 8272 - DNA, 31 bp, artificial sequence
  misc_feature: DNAzyme
gagcgcggggctagctacaacgatcgtcgtg

SEQ ID NO: 8273 - DNA, 31 bp, artificial sequence
  misc_feature: DNAzyme
ctggagcgggctagctacaacgaggctcgtc

SEQ ID NO: 8274 - DNA, 31 bp, artificial sequence
  misc_feature: DNAzyme
ggctggagggctagctacaacgagcggctcg

SEQ ID NO: 8275 - DNA, 31 bp, artificial sequence
  misc_feature: DNAzyme
ggagacggggctagctacaacgatggagcgc

SEQ ID NO: 8276 - DNA, 31 bp, artificial sequence
  misc_feature: DNAzyme
agcggagaggctagctacaacgaggctggag

SEQ ID NO: 8277 - DNA, 31 bp, artificial sequence
  misc_feature: DNAzyme
ggaccaagggctagctacaacgaggagacgg

SEQ ID NO: 8278 - DNA, 31 bp, artificial sequence
  misc_feature: DNAzyme
gtcctggaggctagctacaacgacaagcgga

SEQ ID NO: 8279 - DNA, 31 bp, artificial sequence
  misc_feature: DNAzyme
cggcacagggctagctacaacgacctggacc

SEQ ID NO: 8280 - DNA, 31 bp, artificial sequence
  misc_feature: DNAzyme
catcggcaggctagctacaacgaagtcctgg

SEQ ID NO: 8281 - DNA, 31 bp, artificial sequence
  misc_feature: DNAzyme
ggcatcggggctagctacaacgaacagtcct

SEQ ID NO: 8282 - DNA, 31 bp, artificial sequence
  misc_feature: DNAzyme
tttgggcaggctagctacaacgacggcacag

SEQ ID NO: 8283 - DNA, 31 bp, artificial sequence
  misc_feature: DNAzyme
attttgggggctagctacaacgaatcggcac

SEQ ID NO: 8284 - DNA, 31 bp, artificial sequence
  misc_feature: DNAzyme
gacttccaggctagctacaacgatttgggca

SEQ ID NO: 8285 - DNA, 31 bp, artificial sequence
  misc_feature: DNAzyme
tgactcgaggctagctacaacgattccattt

SEQ ID NO: 8286 - DNA, 31 bp, artificial sequence
  misc_feature: DNAzyme
tcaattgaggctagctacaacgatcgacttc

SEQ ID NO: 8287 - DNA, 31 bp, artificial sequence
  misc_feature: DNAzyme
ccactcaaggctagctacaacgatgactcga

SEQ ID NO: 8288 - DNA, 31 bp, artificial sequence
  misc_feature: DNAzyme
gagtgccaggctagctacaacgatcaattga

SEQ ID NO: 8289 - DNA, 31 bp, artificial sequence
  misc_feature: DNAzyme
gatgagtgggctagctacaacgacactcaat

SEQ ID NO: 8290 - DNA, 31 bp, artificial sequence
  misc_feature: DNAzyme
gtgatgagggctagctacaacgagccactca

SEQ ID NO: 8291 - DNA, 31 bp, artificial sequence
  misc_feature: DNAzyme
atgtgtgaggctagctacaacgagagtgcca

SEQ ID NO: 8292 - DNA, 31 bp, artificial sequence
  misc_feature: DNAzyme
ataatgtgggctagctacaacgagatgagtg

SEQ ID NO: 8293 - DNA, 31 bp, artificial sequence
  misc_feature: DNAzyme
tcataatgggctagctacaacgagtgatgag

SEQ ID NO: 8294 - DNA, 31 bp, artificial sequence
  misc_feature: DNAzyme
catcataaggctagctacaacgagtgtgatg

SEQ ID NO: 8295 - DNA, 31 bp, artificial sequence
  misc_feature: DNAzyme
tgacatcaggctagctacaacgaaatgtgtg

SEQ ID NO: 8296 - DNA, 31 bp, artificial sequence
  misc_feature: DNAzyme
ctatgacaggctagctacaacgacataatgt

SEQ ID NO: 8297 - DNA, 31 bp, artificial sequence
  misc_feature: DNAzyme
gcctatgaggctagctacaacgaatcataat

SEQ ID NO: 8298 - DNA, 31 bp, artificial sequence
  misc_feature: DNAzyme
ggcgcctaggctagctacaacgagacatcat

SEQ ID NO: 8299 - DNA, 31 bp, artificial sequence
  misc_feature: DNAzyme
tgggggcgggctagctacaacgactatgaca

SEQ ID NO: 8300 - DNA, 31 bp, artificial sequence
  misc_feature: DNAzyme
tctgggggggctagctacaacgagcctatga

SEQ ID NO: 8301 - DNA, 31 bp, artificial sequence
  misc_feature: DNAzyme
ggtggttgggctagctacaacgatctggggg

SEQ ID NO: 8302 - DNA, 31 bp, artificial sequence
  misc_feature: DNAzyme
gacggtggggctagctacaacgatgctctgg

SEQ ID NO: 8303 - DNA, 31 bp, artificial sequence
  misc_feature: DNAzyme
gccgacggggctagctacaacgaggttgctc

SEQ ID NO: 8304 - DNA, 31 bp, artificial sequence
  misc_feature: DNAzyme
cttgccgaggctagctacaacgaggtggttg

SEQ ID NO: 8305 - DNA, 31 bp, artificial sequence
  misc_feature: DNAzyme
gttccttgggctagctacaacgacgacggtg

SEQ ID NO: 8306 - DNA, 31 bp, artificial sequence
  misc_feature: DNAzyme
atggcaagggctagctacaacgatccttgcc

SEQ ID NO: 8307 - DNA, 31 bp, artificial sequence
  misc_feature: DNAzyme
acctatggggctagctacaacgaaagttcct

SEQ ID NO: 8308 - DNA, 31 bp, artificial sequence
  misc_feature: DNAzyme
tccacctaggctagctacaacgaggcaagtt

SEQ ID NO: 8309 - DNA, 31 bp, artificial sequence
  misc_feature: DNAzyme
gtactccaggctagctacaacgactatggca

SEQ ID NO: 8310 - DNA, 31 bp, artificial sequence
  misc_feature: DNAzyme
atcacgtaggctagctacaacgatccaccta

SEQ ID NO: 8311 - DNA, 31 bp, artificial sequence
  misc_feature: DNAzyme
ccatcacgggctagctacaacgaactccacc

SEQ ID NO: 8312 - DNA, 31 bp, artificial sequence
  misc_feature: DNAzyme
ccccatcaggctagctacaacgagtactcca

SEQ ID NO: 8313 - DNA, 31 bp, artificial sequence
  misc_feature: DNAzyme
cgcccccaggctagctacaacgacacgtact

SEQ ID NO: 8314 - DNA, 31 bp, artificial sequence
  misc_feature: DNAzyme
cacgggcgggctagctacaacgaccccatca

SEQ ID NO: 8315 - DNA, 31 bp, artificial sequence
  misc_feature: DNAzyme
accacgggggctagctacaacgagcccccat

SEQ ID NO: 8316 - DNA, 31 bp, artificial sequence
  misc_feature: DNAzyme
catcaccaggctagctacaacgagggcgccc

SEQ ID NO: 8317 - DNA, 31 bp, artificial sequence
  misc_feature: DNAzyme
gaccatcaggctagctacaacgacacgggcg

SEQ ID NO: 8318 - DNA, 31 bp, artificial sequence
  misc_feature: DNAzyme
aaggaccaggctagctacaacgacaccacgg

SEQ ID NO: 8319 - DNA, 31 bp, artificial sequence
  misc_feature: DNAzyme
ggtaaggaggctagctacaacgacatcacca

SEQ ID NO: 8320 - DNA, 31 bp, artificial sequence
  misc_feature: DNAzyme
aactggggggctagctacaacgaaaggacca

SEQ ID NO: 8321 - DNA, 31 bp, artificial sequence
  misc_feature: DNAzyme
catcagaaggctagctacaacgatggggtaa

SEQ ID NO: 8322 - DNA, 31 bp, artificial sequence
  misc_feature: DNAzyme
tcctaacaggctagctacaacgacagaactg

SEQ ID NO: 8323 - DNA, 31 bp, artificial sequence
  misc_feature: DNAzyme
gatcctaaggctagctacaacgaatcagaac

SEQ ID NO: 8324 - DNA, 31 bp, artificial sequence
  misc_feature: DNAzyme
ggtgtcgaggctagctacaacgacctaacat

SEQ ID NO: 8325 - DNA, 31 bp, artificial sequence
  misc_feature: DNAzyme
acacggtgggctagctacaacgacgatccta

SEQ ID NO: 8326 - DNA, 31 bp, artificial sequence
  misc_feature: DNAzyme
gcacacggggctagctacaacgagtcgatcc

SEQ ID NO: 8327 - DNA, 31 bp, artificial sequence
  misc_feature: DNAzyme
aaggcacaggctagctacaacgaggtgtcga

SEQ ID NO: 8328 - DNA, 31 bp, artificial sequence
  misc_feature: DNAzyme
ctaaggcaggctagctacaacgaacggtgtc

SEQ ID NO: 8329 - DNA, 31 bp, artificial sequence
  misc_feature: DNAzyme
gtctaaggggctagctacaacgaacacggtg

SEQ ID NO: 8330 - DNA, 31 bp, artificial sequence
  misc_feature: DNAzyme
cgtatatgggctagctacaacgactaaggca

SEQ ID NO: 8331 - DNA, 31 bp, artificial sequence
  misc_feature: DNAzyme
ggcgtataggctagctacaacgagtctaagg

SEQ ID NO: 8332 - DNA, 31 bp, artificial sequence
  misc_feature: DNAzyme
ggggcgtaggctagctacaacgaatgtctaa

SEQ ID NO: 8333 - DNA, 31 bp, artificial sequence
  misc_feature: DNAzyme
ttggggcgggctagctacaacgaatatgtct

SEQ ID NO: 8334 - DNA, 31 bp, artificial sequence
  misc_feature: DNAzyme
gtttggggggctagctacaacgagtatatgt

SEQ ID NO: 8335 - DNA, 31 bp, artificial sequence
  misc_feature: DNAzyme
ccttagggggctagctacaacgattggggcg

SEQ ID NO: 8336 - DNA, 31 bp, artificial sequence
  misc_feature: DNAzyme
taccgccaggctagctacaacgacttagggt

SEQ ID NO: 8337 - DNA, 31 bp, artificial sequence
  misc_feature: DNAzyme
cgttaccgggctagctacaacgacaccttag

SEQ ID NO: 8338 - DNA, 31 bp, artificial sequence
  misc_feature: DNAzyme
gtccgttaggctagctacaacgacgccacct

SEQ ID NO: 8339 - DNA, 31 bp, artificial sequence
  misc_feature: DNAzyme
tccgtccgggctagctacaacgataccgcca

SEQ ID NO: 8340 - DNA, 31 bp, artificial sequence
  misc_feature: DNAzyme
taaatccgggctagctacaacgaccgttacc

SEQ ID NO: 8341 - DNA, 31 bp, artificial sequence
  misc_feature: DNAzyme
gtcctaaaggctagctacaacgaccgtccgt

SEQ ID NO: 8342 - DNA, 31 bp, artificial sequence
  misc_feature: DNAzyme
agtgctcgggctagctacaacgacctaaatc

SEQ ID NO: 8343 - DNA, 31 bp, artificial sequence
  misc_feature: DNAzyme
acaaagtgggctagctacaacgatcgtccta

SEQ ID NO: 8344 - DNA, 31 bp, artificial sequence
  misc_feature: DNAzyme
gtacaaagggctagctacaacgagctcgtcc

SEQ ID NO: 8345 - DNA, 31 bp, artificial sequence
  misc_feature: DNAzyme
caagggtaggctagctacaacgaaaagtgct

SEQ ID NO: 8346 - DNA, 31 bp, artificial sequence
  misc_feature: DNAzyme
cccaagggggctagctacaacgaacaaagtg

SEQ ID NO: 8347 - DNA, 31 bp, artificial sequence
  misc_feature: DNAzyme
atatgcagggctagctacaacgaccaagggt

SEQ ID NO: 8348 - DNA, 31 bp, artificial sequence
  misc_feature: DNAzyme
tgcatatgggctagctacaacgaagcccaag

SEQ ID NO: 8349 - DNA, 31 bp, artificial sequence
  misc_feature: DNAzyme
gctgcataggctagctacaacgagcagccca

SEQ ID NO: 8350 - DNA, 31 bp, artificial sequence
  misc_feature: DNAzyme
cggctgcaggctagctacaacgaatgcagcc

SEQ ID NO: 8351 - DNA, 31 bp, artificial sequence
  misc_feature: DNAzyme
accggctgggctagctacaacgaatatgcag

SEQ ID NO: 8352 - DNA, 31 bp, artificial sequence
  misc_feature: DNAzyme
ggtaccggggctagctacaacgatgcatatg

SEQ ID NO: 8353 - DNA, 31 bp, artificial sequence
  misc_feature: DNAzyme
ctaaggtaggctagctacaacgacggctgca

SEQ ID NO: 8354 - DNA, 31 bp, artificial sequence
  misc_feature: DNAzyme
cactaaggggctagctacaacgaaccggctg

SEQ ID NO: 8355 - DNA, 31 bp, artificial sequence
  misc_feature: DNAzyme
caagagcaggctagctacaacgataaggtac

SEQ ID NO: 8356 - DNA, 31 bp, artificial sequence
  misc_feature: DNAzyme
ggcaagagggctagctacaacgaactaaggt

SEQ ID NO: 8357 - DNA, 31 bp, artificial sequence
  misc_feature: DNAzyme
ggcagcggggctagctacaacgaaagagcac

SEQ ID NO: 8358 - DNA, 31 bp, artificial sequence
  misc_feature: DNAzyme
actggcagggctagctacaacgaggcaagag

SEQ ID NO: 8359 - DNA, 31 bp, artificial sequence
  misc_feature: DNAzyme
cccactggggctagctacaacgaagcggcaa

SEQ ID NO: 8360 - DNA, 31 bp, artificial sequence
  misc_feature: DNAzyme
cgctcccaggctagctacaacgatggcagcg

SEQ ID NO: 8361 - DNA, 31 bp, artificial sequence
  misc_feature: DNAzyme
cctacacgggctagctacaacgatcccactg

SEQ ID NO: 8362 - DNA, 31 bp, artificial sequence
  misc_feature: DNAzyme
cacctacaggctagctacaacgagctcccac

SEQ ID NO: 8363 - DNA, 31 bp, artificial sequence
  misc_feature: DNAzyme
cccacctaggctagctacaacgaacgctccc

SEQ ID NO: 8364 - DNA, 31 bp, artificial sequence
  misc_feature: DNAzyme
gtggcccaggctagctacaacgactacacgc

SEQ ID NO: 8365 - DNA, 31 bp, artificial sequence
  misc_feature: DNAzyme
ccaagtggggctagctacaacgaccacctac

SEQ ID NO: 8366 - DNA, 31 bp, artificial sequence
  misc_feature: DNAzyme
attccaagggctagctacaacgaggcccacc

SEQ ID NO: 8367 - DNA, 31 bp, artificial sequence
  misc_feature: DNAzyme
cgcagacaggctagctacaacgatccaagtg

SEQ ID NO: 8368 - DNA, 31 bp, artificial sequence
  misc_feature: DNAzyme
accgcagaggctagctacaacgaattccaag

SEQ ID NO: 8369 - DNA, 31 bp, artificial sequence
  misc_feature: DNAzyme
ccgtaccgggctagctacaacgaagacattc

SEQ ID NO: 8370 - DNA, 31 bp, artificial sequence
  misc_feature: DNAzyme
cagccgtaggctagctacaacgacgcagaca

SEQ ID NO: 8371 - DNA, 31 bp, artificial sequence
  misc_feature: DNAzyme
cccagccgggctagctacaacgaaccgcaga

SEQ ID NO: 8372 - DNA, 31 bp, artificial sequence
  misc_feature: DNAzyme
ccccccagggctagctacaacgacgtaccgc

SEQ ID NO: 8373 - DNA, 31 bp, artificial sequence
  misc_feature: DNAzyme
acaactcgggctagctacaacgaccccccca

SEQ ID NO: 8374 - DNA, 31 bp, artificial sequence
  misc_feature: DNAzyme
acggacaaggctagctacaacgatcgtcccc

SEQ ID NO: 8375 - DNA, 31 bp, artificial sequence
  misc_feature: DNAzyme
ttcacggaggctagctacaacgaaactcgtc

SEQ ID NO: 8376 - DNA, 31 bp, artificial sequence
  misc_feature: DNAzyme
ggtcttcaggctagctacaacgaggacaact

SEQ ID NO: 8377 - DNA, 31 bp, artificial sequence
  misc_feature: DNAzyme
gtccccggggctagctacaacgacttcacgg

SEQ ID NO: 8378 - DNA, 31 bp, artificial sequence
  misc_feature: DNAzyme
ccatgcggggctagctacaacgaccccggtc

SEQ ID NO: 8379 - DNA, 31 bp, artificial sequence
  misc_feature: DNAzyme
ctaccatgggctagctacaacgaggtccccg

SEQ ID NO: 8380 - DNA, 31 bp, artificial sequence
  misc_feature: DNAzyme
aactaccaggctagctacaacgagcggtccc

SEQ ID NO: 8381 - DNA, 31 bp, artificial sequence
  misc_feature: DNAzyme
ggaaactaggctagctacaacgacatgcggt

SEQ ID NO: 8382 - DNA, 31 bp, artificial sequence
  misc_feature: DNAzyme
tatggaaaggctagctacaacgataccatgc

SEQ ID NO: 8383 - DNA, 31 bp, artificial sequence
  misc_feature: DNAzyme
tgagtctaggctagctacaacgaggaaacta

SEQ ID NO: 8384 - DNA, 31 bp, artificial sequence
  misc_feature: DNAzyme
ccgttgagggctagctacaacgactatggaa

SEQ ID NO: 8385 - DNA, 31 bp, artificial sequence
  misc_feature: DNAzyme
tgtacccgggctagctacaacgatgagtcta

SEQ ID NO: 8386 - DNA, 31 bp, artificial sequence
  misc_feature: DNAzyme
actttgtaggctagctacaacgaccgttgag

SEQ ID NO: 8387 - DNA, 31 bp, artificial sequence
  misc_feature: DNAzyme
ggactttgggctagctacaacgaacccgttg

SEQ ID NO: 8388 - DNA, 31 bp, artificial sequence
  misc_feature: DNAzyme
gcggtggaggctagctacaacgatttgtacc

SEQ ID NO: 8389 - DNA, 31 bp, artificial sequence
  misc_feature: DNAzyme
gaaggcggggctagctacaacgaggactttg

SEQ ID NO: 8390 - DNA, 31 bp, artificial sequence
  misc_feature: DNAzyme
tgcgaaggggctagctacaacgaggtggact

SEQ ID NO: 8391 - DNA, 31 bp, artificial sequence
  misc_feature: DNAzyme
gggggttgggctagctacaacgagaaggcgg

SEQ ID NO: 8392 - DNA, 31 bp, artificial sequence
  misc_feature: DNAzyme
ccggggggggctagctacaacgatgcgaagg

SEQ ID NO: 8393 - DNA, 31 bp, artificial sequence
  misc_feature: DNAzyme
tgtgtgcaggctagctacaacgaccgggggg

SEQ ID NO: 8394 - DNA, 31 bp, artificial sequence
  misc_feature: DNAzyme
gctgtgtgggctagctacaacgaacccgggg

SEQ ID NO: 8395 - DNA, 31 bp, artificial sequence
  misc_feature: DNAzyme
ctgctgtgggctagctacaacgagcacccgg

SEQ ID NO: 8396 - DNA, 31 bp, artificial sequence
  misc_feature: DNAzyme
ggctgctgggctagctacaacgagtgcaccc

SEQ ID NO: 8397 - DNA, 31 bp, artificial sequence
  misc_feature: DNAzyme
ccgggctgggctagctacaacgatgtgtgca

SEQ ID NO: 8398 - DNA, 31 bp, artificial sequence
  misc_feature: DNAzyme
cttccgggggctagctacaacgatgctgtgt

SEQ ID NO: 8399 - DNA, 31 bp, artificial sequence
  misc_feature: DNAzyme
tgtgggcaggctagctacaacgacttccggg

SEQ ID NO: 8400 - DNA, 31 bp, artificial sequence
  misc_feature: DNAzyme
gttgtgggggctagctacaacgaatcttccg

SEQ ID NO: 8401 - DNA, 31 bp, artificial sequence
  misc_feature: DNAzyme
gcacgttgggctagctacaacgagggcatct

SEQ ID NO: 8402 - DNA, 31 bp, artificial sequence
  misc_feature: DNAzyme
ggggcacgggctagctacaacgatgtgggca

SEQ ID NO: 8403 - DNA, 31 bp, artificial sequence
  misc_feature: DNAzyme
tcggggcaggctagctacaacgagttgtggg

SEQ ID NO: 8404 - DNA, 31 bp, artificial sequence
  misc_feature: DNAzyme
cttcggggggctagctacaacgaacgttgtg

SEQ ID NO: 8405 - DNA, 31 bp, artificial sequence
  misc_feature: DNAzyme
ctgctctgggctagctacaacgaccttcggg

SEQ ID NO: 8406 - DNA, 31 bp, artificial sequence
  misc_feature: DNAzyme
gtccactgggctagctacaacgatctgccct

SEQ ID NO: 8407 - DNA, 31 bp, artificial sequence
  misc_feature: DNAzyme
gcggtccaggctagctacaacgatgctctgc

SEQ ID NO: 8408 - DNA, 31 bp, artificial sequence
  misc_feature: DNAzyme
tcgggcggggctagctacaacgaccactgct

SEQ ID NO: 8409 - DNA, 31 bp, artificial sequence
  misc_feature: DNAzyme
tcctcgggggctagctacaacgaggtccact

SEQ ID NO: 8410 - DNA, 31 bp, artificial sequence
  misc_feature: DNAzyme
ttgaagggggctagctacaacgatcctcggg

SEQ ID NO: 8411 - DNA, 31 bp, artificial sequence
  misc_feature: DNAzyme
atctcctaggctagctacaacgattgaaggg

SEQ ID NO: 8412 - DNA, 31 bp, artificial sequence
  misc_feature: DNAzyme
caggcccaggctagctacaacgactcctact

SEQ ID NO: 8413 - DNA, 31 bp, artificial sequence
  misc_feature: DNAzyme
cccccaggggctagctacaacgaccatctcc

SEQ ID NO: 8414 - DNA, 31 bp, artificial sequence
  misc_feature: DNAzyme
gcttactaggctagctacaacgacccccagg

SEQ ID NO: 8415 - DNA, 31 bp, artificial sequence
  misc_feature: DNAzyme
ggagcttaggctagctacaacgatatccccc

SEQ ID NO: 8416 - DNA, 31 bp, artificial sequence
  misc_feature: DNAzyme
agggggagggctagctacaacgattactatc

SEQ ID NO: 8417 - DNA, 31 bp, artificial sequence
  misc_feature: DNAzyme
ggtgacagggctagctacaacgaagggggag

SEQ ID NO: 8418 - DNA, 31 bp, artificial sequence
  misc_feature: DNAzyme
cggggtgaggctagctacaacgaagcagggg

SEQ ID NO: 8419 - DNA, 31 bp, artificial sequence
  misc_feature: DNAzyme
cggcggggggctagctacaacgagacagcag

SEQ ID NO: 8420 - DNA, 31 bp, artificial sequence
  misc_feature: DNAzyme
tgcgccggggctagctacaacgaggggtgac

SEQ ID NO: 8421 - DNA, 31 bp, artificial sequence
  misc_feature: DNAzyme
ccggtgcgggctagctacaacgacggcgggg

SEQ ID NO: 8422 - DNA, 31 bp, artificial sequence
  misc_feature: DNAzyme
ttccggtgggctagctacaacgagccggcgg

SEQ ID NO: 8423 - DNA, 31 bp, artificial sequence
  misc_feature: DNAzyme
cattccggggctagctacaacgagcgccggc

SEQ ID NO: 8424 - DNA, 31 bp, artificial sequence
  misc_feature: DNAzyme
tgatgtcaggctagctacaacgatccggtgc

SEQ ID NO: 8425 - DNA, 31 bp, artificial sequence
  misc_feature: DNAzyme
cgctgatgggctagctacaacgacattccgg

SEQ ID NO: 8426 - DNA, 31 bp, artificial sequence
  misc_feature: DNAzyme
cacgctgaggctagctacaacgagtcattcc

SEQ ID NO: 8427 - DNA, 31 bp, artificial sequence
  misc_feature: DNAzyme
gagacacgggctagctacaacgatgatgtca

SEQ ID NO: 8428 - DNA, 31 bp, artificial sequence
  misc_feature: DNAzyme
acgagacaggctagctacaacgagctgatgt

SEQ ID NO: 8429 - DNA, 31 bp, artificial sequence
  misc_feature: DNAzyme
tcacgagaggctagctacaacgaacgctgat

SEQ ID NO: 8430 - DNA, 31 bp, artificial sequence
  misc_feature: DNAzyme
cttggtcaggctagctacaacgagagacacg

SEQ ID NO: 8431 - DNA, 31 bp, artificial sequence
  misc_feature: DNAzyme
ttacttggggctagctacaacgacacgagac

SEQ ID NO: 8432 - DNA, 31 bp, artificial sequence
  misc_feature: DNAzyme
gacctttaggctagctacaacgattggtcac

SEQ ID NO: 8433 - DNA, 31 bp, artificial sequence
  misc_feature: DNAzyme
ggctcggaggctagctacaacgactttactt

SEQ ID NO: 8434 - DNA, 31 bp, artificial sequence
  misc_feature: DNAzyme
tgcggcggggctagctacaacgatcggacct

SEQ ID NO: 8435 - DNA, 31 bp, artificial sequence
  misc_feature: DNAzyme
acctgcggggctagctacaacgaggctcgga

SEQ ID NO: 8436 - DNA, 31 bp, artificial sequence
  misc_feature: DNAzyme
tgcacctgggctagctacaacgaggcggctc

SEQ ID NO: 8437 - DNA, 31 bp, artificial sequence
  misc_feature: DNAzyme
accatgcaggctagctacaacgactgcggcg

SEQ ID NO: 8438 - DNA, 31 bp, artificial sequence
  misc_feature: DNAzyme
acaccatgggctagctacaacgaacctgcgg

SEQ ID NO: 8439 - DNA, 31 bp, artificial sequence
  misc_feature: DNAzyme
tgacaccaggctagctacaacgagcacctgc

SEQ ID NO: 8440 - DNA, 31 bp, artificial sequence
  misc_feature: DNAzyme
ccttgacaggctagctacaacgacatgcacc

SEQ ID NO: 8441 - DNA, 31 bp, artificial sequence
  misc_feature: DNAzyme
gtccttgaggctagctacaacgaaccatgca

SEQ ID NO: 8442 - DNA, 31 bp, artificial sequence
  misc_feature: DNAzyme
gagcgcggggctagctacaacgaccttgaca

SEQ ID NO: 8443 - DNA, 31 bp, artificial sequence
  misc_feature: DNAzyme
ccggagcgggctagctacaacgaggtccttg

SEQ ID NO: 8444 - DNA, 31 bp, artificial sequence
  misc_feature: DNAzyme
ccccggagggctagctacaacgagcggtcct

SEQ ID NO: 8445 - DNA, 31 bp, artificial sequence
  misc_feature: DNAzyme
ggccggcgggctagctacaacgacccccgga

SEQ ID NO: 8446 - DNA, 31 bp, artificial sequence
  misc_feature: DNAzyme
atggccggggctagctacaacgagccccccg

SEQ ID NO: 8447 - DNA, 31 bp, artificial sequence
  misc_feature: DNAzyme
tcggatggggctagctacaacgacggcgccc

SEQ ID NO: 8448 - DNA, 31 bp, artificial sequence
  misc_feature: DNAzyme
tcgtcggaggctagctacaacgaggccggcg

SEQ ID NO: 8449 - DNA, 31 bp, artificial sequence
  misc_feature: DNAzyme
ggacctcgggctagctacaacgacggatggc

SEQ ID NO: 8450 - DNA, 31 bp, artificial sequence
  misc_feature: DNAzyme
gaccaggaggctagctacaacgactcgtcgg

SEQ ID NO: 8451 - DNA, 31 bp, artificial sequence
  misc_feature: DNAzyme
aatgtagaggctagctacaacgacaggacct

SEQ ID NO: 8452 - DNA, 31 bp, artificial sequence
  misc_feature: DNAzyme
caccaatgggctagctacaacgaagaccagg

SEQ ID NO: 8453 - DNA, 31 bp, artificial sequence
  misc_feature: DNAzyme
tacaccaaggctagctacaacgagtagacca

SEQ ID NO: 8454 - DNA, 31 bp, artificial sequence
  misc_feature: DNAzyme
aatgtacaggctagctacaacgacaatgtag

SEQ ID NO: 8455 - DNA, 31 bp, artificial sequence
  misc_feature: DNAzyme
caaatgtaggctagctacaacgaaccaatgt

SEQ ID NO: 8456 - DNA, 31 bp, artificial sequence
  misc_feature: DNAzyme
cccaaatgggctagctacaacgaacaccaat

SEQ ID NO: 8457 - DNA, 31 bp, artificial sequence
  misc_feature: DNAzyme
cacccaaaggctagctacaacgagtacacca

SEQ ID NO: 8458 - DNA, 31 bp, artificial sequence
  misc_feature: DNAzyme
tccaatcaggctagctacaacgaccaaatgt

SEQ ID NO: 8459 - DNA, 31 bp, artificial sequence
  misc_feature: DNAzyme
gggtccaaggctagctacaacgacacccaaa

SEQ ID NO: 8460 - DNA, 31 bp, artificial sequence
  misc_feature: DNAzyme
ccaaagggggctagctacaacgaccaatcac

SEQ ID NO: 8461 - DNA, 31 bp, artificial sequence
  misc_feature: DNAzyme
ctagccggggctagctacaacgaccaaaggg

SEQ ID NO: 8462 - DNA, 31 bp, artificial sequence
  misc_feature: DNAzyme
gaccctagggctagctacaacgacggcccaa

SEQ ID NO: 8463 - DNA, 31 bp, artificial sequence
  misc_feature: DNAzyme
ctcaaagaggctagctacaacgacctagccg

SEQ ID NO: 8464 - DNA, 31 bp, artificial sequence
  misc_feature: DNAzyme
ggcgccggggctagctacaacgatcaaagac

SEQ ID NO: 8465 - DNA, 31 bp, artificial sequence
  misc_feature: DNAzyme
ccacggcgggctagctacaacgacggctcaa

SEQ ID NO: 8466 - DNA, 31 bp, artificial sequence
  misc_feature: DNAzyme
taccacggggctagctacaacgagccggctc

SEQ ID NO: 8467 - DNA, 31 bp, artificial sequence
  misc_feature: DNAzyme
gtctaccaggctagctacaacgaggcgccgg

SEQ ID NO: 8468 - DNA, 31 bp, artificial sequence
  misc_feature: DNAzyme
actgtctaggctagctacaacgacacggcgc

SEQ ID NO: 8469 - DNA, 31 bp, artificial sequence
  misc_feature: DNAzyme
ctggactgggctagctacaacgactaccacg

SEQ ID NO: 8470 - DNA, 31 bp, artificial sequence
  misc_feature: DNAzyme
gtgctggaggctagctacaacgatgtctacc

SEQ ID NO: 8471 - DNA, 31 bp, artificial sequence
  misc_feature: DNAzyme
ggcgtgtgggctagctacaacgatggactgt

SEQ ID NO: 8472 - DNA, 31 bp, artificial sequence
  misc_feature: DNAzyme
acggcgtgggctagctacaacgagctggact

SEQ ID NO: 8473 - DNA, 31 bp, artificial sequence
  misc_feature: DNAzyme
caacggcgggctagctacaacgagtgctgga

SEQ ID NO: 8474 - DNA, 31 bp, artificial sequence
  misc_feature: DNAzyme
gtcaacggggctagctacaacgagtgtgctg

SEQ ID NO: 8475 - DNA, 31 bp, artificial sequence
  misc_feature: DNAzyme
tgcgtcaaggctagctacaacgaggcgtgtg

SEQ ID NO: 8476 - DNA, 31 bp, artificial sequence
  misc_feature: DNAzyme
gacctgcgggctagctacaacgacaacggcg

SEQ ID NO: 8477 - DNA, 31 bp, artificial sequence
  misc_feature: DNAzyme
gcgacctgggctagctacaacgagtcaacgg

SEQ ID NO: 8478 - DNA, 31 bp, artificial sequence
  misc_feature: DNAzyme
cctagcgaggctagctacaacgactgcgtca

SEQ ID NO: 8479 - DNA, 31 bp, artificial sequence
  misc_feature: DNAzyme
tttcctagggctagctacaacgagacctgcg

SEQ ID NO: 8480 - DNA, 31 bp, artificial sequence
  misc_feature: DNAzyme
cgacgcagggctagctacaacgactttccta

SEQ ID NO: 8481 - DNA, 31 bp, artificial sequence
  misc_feature: DNAzyme
ccgcgacgggctagctacaacgaagtctttc

SEQ ID NO: 8482 - DNA, 31 bp, artificial sequence
  misc_feature: DNAzyme
caccgcgaggctagctacaacgagcagtctt

SEQ ID NO: 8483 - DNA, 31 bp, artificial sequence
  misc_feature: DNAzyme
ttccaccgggctagctacaacgagacgcagt

SEQ ID NO: 8484 - DNA, 31 bp, artificial sequence
  misc_feature: DNAzyme
ggtttccaggctagctacaacgacgcgacgc

SEQ ID NO: 8485 - DNA, 31 bp, artificial sequence
  misc_feature: DNAzyme
tcaagtggggctagctacaacgattccaccg

SEQ ID NO: 8486 - DNA, 31 bp, artificial sequence
  misc_feature: DNAzyme
agttcaagggctagctacaacgaggtttcca

SEQ ID NO: 8487 - DNA, 31 bp, artificial sequence
  misc_feature: DNAzyme
gggggaagggctagctacaacgatcaagtgg

SEQ ID NO: 8488 - DNA, 31 bp, artificial sequence
  misc_feature: DNAzyme
gaaccaagggctagctacaacgacgaggggg

SEQ ID NO: 8489 - DNA, 31 bp, artificial sequence
  misc_feature: DNAzyme
gacaagaaggctagctacaacgacaagtcga

SEQ ID NO: 8490 - DNA, 31 bp, artificial sequence
  misc_feature: DNAzyme
ggccgggaggctagctacaacgaaagaacca

SEQ ID NO: 8491 - DNA, 31 bp, artificial sequence
  misc_feature: DNAzyme
ctcacgggggctagctacaacgacgggacaa

SEQ ID NO: 8492 - DNA, 31 bp, artificial sequence
  misc_feature: DNAzyme
cagcctcaggctagctacaacgagggccggg

SEQ ID NO: 8493 - DNA, 31 bp, artificial sequence
  misc_feature: DNAzyme
atcaccagggctagctacaacgactcacggg

SEQ ID NO: 8494 - DNA, 31 bp, artificial sequence
  misc_feature: DNAzyme
cattatcaggctagctacaacgacagcctca

SEQ ID NO: 8495 - DNA, 31 bp, artificial sequence
  misc_feature: DNAzyme
ctgcattaggctagctacaacgacaccagcc

SEQ ID NO: 8496 - DNA, 31 bp, artificial sequence
  misc_feature: DNAzyme
tggctgcaggctagctacaacgatatcacca

SEQ ID NO: 8497 - DNA, 31 bp, artificial sequence
  misc_feature: DNAzyme
tttggctgggctagctacaacgaattatcac

SEQ ID NO: 8498 - DNA, 31 bp, artificial sequence
  misc_feature: DNAzyme
ctgtttggggctagctacaacgatgcattat

SEQ ID NO: 8499 - DNA, 31 bp, artificial sequence
  misc_feature: DNAzyme
ggggcctgggctagctacaacgattggctgc

SEQ ID NO: 8500 - DNA, 31 bp, artificial sequence
  misc_feature: DNAzyme
acgcggggggctagctacaacgactgtttgg

SEQ ID NO: 8501 - DNA, 31 bp, artificial sequence
  misc_feature: DNAzyme
aacagacgggctagctacaacgaggggcctg

SEQ ID NO: 8502 - DNA, 31 bp, artificial sequence
  misc_feature: DNAzyme
ccaacagaggctagctacaacgagcggggcc

SEQ ID NO: 8503 - DNA, 31 bp, artificial sequence
  misc_feature: DNAzyme
actcccaaggctagctacaacgaagacgcgg

SEQ ID NO: 8504 - DNA, 31 bp, artificial sequence
  misc_feature: DNAzyme
acggcctaggctagctacaacgatcccaaca

SEQ ID NO: 8505 - DNA, 31 bp, artificial sequence
  misc_feature: DNAzyme
cattacggggctagctacaacgactactccc

SEQ ID NO: 8506 - DNA, 31 bp, artificial sequence
  misc_feature: DNAzyme
gcccattaggctagctacaacgaggcctact

SEQ ID NO: 8507 - DNA, 31 bp, artificial sequence
  misc_feature: DNAzyme
cgcgcccaggctagctacaacgatacggcct

SEQ ID NO: 8508 - DNA, 31 bp, artificial sequence
  misc_feature: DNAzyme
tcctcgcgggctagctacaacgaccattacg

SEQ ID NO: 8509 - DNA, 31 bp, artificial sequence
  misc_feature: DNAzyme
actcctcgggctagctacaacgagcccatta

SEQ ID NO: 8510 - DNA, 31 bp, artificial sequence
  misc_feature: DNAzyme
ggtggcgaggctagctacaacgatcctcgcg

SEQ ID NO: 8511 - DNA, 31 bp, artificial sequence
  misc_feature: DNAzyme
aggggtggggctagctacaacgagactcctc

SEQ ID NO: 8512 - DNA, 31 bp, artificial sequence
  misc_feature: DNAzyme
ggcaggggggctagctacaacgaggcgactc

SEQ ID NO: 8513 - DNA, 31 bp, artificial sequence
  misc_feature: DNAzyme
ttgaggggggctagctacaacgaaggggtgg

SEQ ID NO: 8514 - DNA, 31 bp, artificial sequence
  misc_feature: DNAzyme
gccgacagggctagctacaacgacttgaggg

SEQ ID NO: 8515 - DNA, 31 bp, artificial sequence
  misc_feature: DNAzyme
ccagccgaggctagctacaacgaagtcttga

SEQ ID NO: 8516 - DNA, 31 bp, artificial sequence
  misc_feature: DNAzyme
aggaccagggctagctacaacgacgacagtc

SEQ ID NO: 8517 - DNA, 31 bp, artificial sequence
  misc_feature: DNAzyme
tcctaggaggctagctacaacgacagccgac

SEQ ID NO: 8518 - DNA, 31 bp, artificial sequence
  misc_feature: DNAzyme
gggagataggctagctacaacgatcctagga

SEQ ID NO: 8519 - DNA, 31 bp, artificial sequence
  misc_feature: DNAzyme
gagggagaggctagctacaacgaactcctag

SEQ ID NO: 8520 - DNA, 31 bp, artificial sequence
  misc_feature: DNAzyme
tgtctccgggctagctacaacgaccgaaggg

SEQ ID NO: 8521 - DNA, 31 bp, artificial sequence
  misc_feature: DNAzyme
tctacctgggctagctacaacgactccgccc

SEQ ID NO: 8522 - DNA, 31 bp, artificial sequence
  misc_feature: DNAzyme
tgggtctaggctagctacaacgactgtctcc

SEQ ID NO: 8523 - DNA, 31 bp, artificial sequence
  misc_feature: DNAzyme
attatgggggctagctacaacgactacctgt

SEQ ID NO: 8524 - DNA, 31 bp, artificial sequence
  misc_feature: DNAzyme
catcattaggctagctacaacgagggtctac

SEQ ID NO: 8525 - DNA, 31 bp, artificial sequence
  misc_feature: DNAzyme
ggacatcaggctagctacaacgatatgggtc

SEQ ID NO: 8526 - DNA, 31 bp, artificial sequence
  misc_feature: DNAzyme
tggggacaggctagctacaacgacattatgg

SEQ ID NO: 8527 - DNA, 31 bp, artificial sequence
  misc_feature: DNAzyme
tgtggggaggctagctacaacgaatcattat

SEQ ID NO: 8528 - DNA, 31 bp, artificial sequence
  misc_feature: DNAzyme
gcggcgtgggctagctacaacgaggggacat

SEQ ID NO: 8529 - DNA, 31 bp, artificial sequence
  misc_feature: DNAzyme
ccgcggcgggctagctacaacgagtggggac

SEQ ID NO: 8530 - DNA, 31 bp, artificial sequence
  misc_feature: DNAzyme
caccgcggggctagctacaacgagtgtgggg

SEQ ID NO: 8531 - DNA, 31 bp, artificial sequence
  misc_feature: DNAzyme
agacaccgggctagctacaacgaggcgtgtg

SEQ ID NO: 8532 - DNA, 31 bp, artificial sequence
  misc_feature: DNAzyme
gggagacaggctagctacaacgacgcggcgt

SEQ ID NO: 8533 - DNA, 31 bp, artificial sequence
  misc_feature: DNAzyme
gggggagaggctagctacaacgaaccgcggc

SEQ ID NO: 8534 - DNA, 31 bp, artificial sequence
  misc_feature: DNAzyme
gatcatcaggctagctacaacgactgggggg

SEQ ID NO: 8535 - DNA, 31 bp, artificial sequence
  misc_feature: DNAzyme
caagatcaggctagctacaacgacacctggg

SEQ ID NO: 8536 - DNA, 31 bp, artificial sequence
  misc_feature: DNAzyme
aatcaagaggctagctacaacgacatcacct

SEQ ID NO: 8537 - DNA, 31 bp, artificial sequence
  misc_feature: DNAzyme
catggaaaggctagctacaacgacaagatca

SEQ ID NO: 8538 - DNA, 31 bp, artificial sequence
  misc_feature: DNAzyme
ctccgacaggctagctacaacgaggaaatca

SEQ ID NO: 8539 - DNA, 31 bp, artificial sequence
  misc_feature: DNAzyme
ttctccgaggctagctacaacgaatggaaat

SEQ ID NO: 8540 - DNA, 31 bp, artificial sequence
  misc_feature: DNAzyme
gcccgtcgggctagctacaacgacttctccg

SEQ ID NO: 8541 - DNA, 31 bp, artificial sequence
  misc_feature: DNAzyme
cgagcccgggctagctacaacgacgtcttct

SEQ ID NO: 8542 - DNA, 31 bp, artificial sequence
  misc_feature: DNAzyme
cggtcgagggctagctacaacgaccgtcgtc

SEQ ID NO: 8543 - DNA, 31 bp, artificial sequence
  misc_feature: DNAzyme
ggtagcggggctagctacaacgacgagcccg

SEQ ID NO: 8544 - DNA, 31 bp, artificial sequence
  misc_feature: DNAzyme
ggcggtagggctagctacaacgaggtcgagc

SEQ ID NO: 8545 - DNA, 31 bp, artificial sequence
  misc_feature: DNAzyme
cctggcggggctagctacaacgaagcggtcg

SEQ ID NO: 8546 - DNA, 31 bp, artificial sequence
  misc_feature: DNAzyme
agacctggggctagctacaacgaggtagcgg

SEQ ID NO: 8547 - DNA, 31 bp, artificial sequence
  misc_feature: DNAzyme
ctacgagaggctagctacaacgactggcggt

SEQ ID NO: 8548 - DNA, 31 bp, artificial sequence
  misc_feature: DNAzyme
caggtctaggctagctacaacgagagacctg

SEQ ID NO: 8549 - DNA, 31 bp, artificial sequence
  misc_feature: DNAzyme
cacacaggggctagctacaacgactacgaga

SEQ ID NO: 8550 - DNA, 31 bp, artificial sequence
  misc_feature: DNAzyme
ggcccacaggctagctacaacgaaggtctac

SEQ ID NO: 8551 - DNA, 31 bp, artificial sequence
  misc_feature: DNAzyme
tgggcccaggctagctacaacgaacaggtct

SEQ ID NO: 8552 - DNA, 31 bp, artificial sequence
  misc_feature: DNAzyme
ggactgggggctagctacaacgaccacacag

SEQ ID NO: 8553 - DNA, 31 bp, artificial sequence
  misc_feature: DNAzyme
ctgcaggaggctagctacaacgatgggccca

SEQ ID NO: 8554 - DNA, 31 bp, artificial sequence
  misc_feature: DNAzyme
ctccactgggctagctacaacgaaggactgg

SEQ ID NO: 8555 - DNA, 31 bp, artificial sequence
  misc_feature: DNAzyme
tcactccaggctagctacaacgatgcaggac

SEQ ID NO: 8556 - DNA, 31 bp, artificial sequence
  misc_feature: DNAzyme
ccacctcaggctagctacaacgatccactgc

SEQ ID NO: 8557 - DNA, 31 bp, artificial sequence
  misc_feature: DNAzyme
tatgaccaggctagctacaacgactcactcc

SEQ ID NO: 8558 - DNA, 31 bp, artificial sequence
  misc_feature: DNAzyme
gtctatgaggctagctacaacgacacctcac

SEQ ID NO: 8559 - DNA, 31 bp, artificial sequence
  misc_feature: DNAzyme
tccgtctaggctagctacaacgagaccacct

SEQ ID NO: 8560 - DNA, 31 bp, artificial sequence
  misc_feature: DNAzyme
tacgtccgggctagctacaacgactatgacc

SEQ ID NO: 8561 - DNA, 31 bp, artificial sequence
  misc_feature: DNAzyme
aaggtacgggctagctacaacgaccgtctat

SEQ ID NO: 8562 - DNA, 31 bp, artificial sequence
  misc_feature: DNAzyme
gaaaggtaggctagctacaacgagtccgtct

SEQ ID NO: 8563 - DNA, 31 bp, artificial sequence
  misc_feature: DNAzyme
ttgaaaggggctagctacaacgaacgtccgt

SEQ ID NO: 8564 - DNA, 31 bp, artificial sequence
  misc_feature: DNAzyme
tggccgaaggctagctacaacgatgaaaggt

SEQ ID NO: 8565 - DNA, 31 bp, artificial sequence
  misc_feature: DNAzyme
gaagttggggctagctacaacgacgaattga

SEQ ID NO: 8566 - DNA, 31 bp, artificial sequence
  misc_feature: DNAzyme
tcatgaagggctagctacaacgatggccgaa

SEQ ID NO: 8567 - DNA, 31 bp, artificial sequence
  misc_feature: DNAzyme
ggccttcaggctagctacaacgagaagttgg

SEQ ID NO: 8568 - DNA, 31 bp, artificial sequence
  misc_feature: DNAzyme
ccaaatggggctagctacaacgacttcatga

SEQ ID NO: 8569 - DNA, 31 bp, artificial sequence
  misc_feature: DNAzyme
tgtccaaaggctagctacaacgaggccttca

SEQ ID NO: 8570 - DNA, 31 bp, artificial sequence
  misc_feature: DNAzyme
gcaatatgggctagctacaacgaccaaatgg

SEQ ID NO: 8571 - DNA, 31 bp, artificial sequence
  misc_feature: DNAzyme
gggcaataggctagctacaacgagtccaaat

SEQ ID NO: 8572 - DNA, 31 bp, artificial sequence
  misc_feature: DNAzyme
gggggcaaggctagctacaacgaatgtccaa

SEQ ID NO: 8573 - DNA, 31 bp, artificial sequence
  misc_feature: DNAzyme
gtggggggggctagctacaacgaaatatgtc

SEQ ID NO: 8574 - DNA, 31 bp, artificial sequence
  misc_feature: DNAzyme
aaagtcggggctagctacaacgaggggggca

SEQ ID NO: 8575 - DNA, 31 bp, artificial sequence
  misc_feature: DNAzyme
gcggaaagggctagctacaacgacggtgggg

SEQ ID NO: 8576 - DNA, 31 bp, artificial sequence
  misc_feature: DNAzyme
ttttggtgggctagctacaacgaggaaagtc

SEQ ID NO: 8577 - DNA, 31 bp, artificial sequence
  misc_feature: DNAzyme
cattttggggctagctacaacgagcggaaag

SEQ ID NO: 8578 - DNA, 31 bp, artificial sequence
  misc_feature: DNAzyme
tgaatgcaggctagctacaacgatttggtgc

SEQ ID NO: 8579 - DNA, 31 bp, artificial sequence
  misc_feature: DNAzyme
cgtgaatgggctagctacaacgaattttggt

SEQ ID NO: 8580 - DNA, 31 bp, artificial sequence
  misc_feature: DNAzyme
tccgtgaaggctagctacaacgagcattttg

SEQ ID NO: 8581 - DNA, 31 bp, artificial sequence
  misc_feature: DNAzyme
gtcatccgggctagctacaacgagaatgcat

SEQ ID NO: 8582 - DNA, 31 bp, artificial sequence
  misc_feature: DNAzyme
aggggtcaggctagctacaacgaccgtgaat

SEQ ID NO: 8583 - DNA, 31 bp, artificial sequence
  misc_feature: DNAzyme
tcaaggggggctagctacaacgacatccgtg

SEQ ID NO: 8584 - DNA, 31 bp, artificial sequence
  misc_feature: DNAzyme
tgtgcgggggctagctacaacgatcaagggg

SEQ ID NO: 8585 - DNA, 31 bp, artificial sequence
  misc_feature: DNAzyme
actttgtgggctagctacaacgagggctcaa

SEQ ID NO: 8586 - DNA, 31 bp, artificial sequence
  misc_feature: DNAzyme
ggactttgggctagctacaacgagcgggctc

SEQ ID NO: 8587 - DNA, 31 bp, artificial sequence
  misc_feature: DNAzyme
gtgccggaggctagctacaacgatttgtgcg

SEQ ID NO: 8588 - DNA, 31 bp, artificial sequence
  misc_feature: DNAzyme
caaaagtgggctagctacaacgacggacttt

SEQ ID NO: 8589 - DNA, 31 bp, artificial sequence
  misc_feature: DNAzyme
agcaaaagggctagctacaacgagccggact

SEQ ID NO: 8590 - DNA, 31 bp, artificial sequence
  misc_feature: DNAzyme
tggtatagggctagctacaacgaaaaagtgc

SEQ ID NO: 8591 - DNA, 31 bp, artificial sequence
  misc_feature: DNAzyme
ggctggtaggctagctacaacgaagcaaaag

SEQ ID NO: 8592 - DNA, 31 bp, artificial sequence
  misc_feature: DNAzyme
caggctggggctagctacaacgaatagcaaa

SEQ ID NO: 8593 - DNA, 31 bp, artificial sequence
  misc_feature: DNAzyme
gctccaggggctagctacaacgatggtatag

SEQ ID NO: 8594 - DNA, 31 bp, artificial sequence
  misc_feature: DNAzyme
tcatggtgggctagctacaacgatccaggct

SEQ ID NO: 8595 - DNA, 31 bp, artificial sequence
  misc_feature: DNAzyme
gctcatggggctagctacaacgagctccagg

SEQ ID NO: 8596 - DNA, 31 bp, artificial sequence
  misc_feature: DNAzyme
cccgctcaggctagctacaacgaggtgctcc

SEQ ID NO: 8597 - DNA, 31 bp, artificial sequence
  misc_feature: DNAzyme
tcggcccgggctagctacaacgatcatggtg

SEQ ID NO: 8598 - DNA, 31 bp, artificial sequence
  misc_feature: DNAzyme
atactcggggctagctacaacgaccgctcat

SEQ ID NO: 8599 - DNA, 31 bp, artificial sequence
  misc_feature: DNAzyme
tcgccataggctagctacaacgatcggcccg

SEQ ID NO: 8600 - DNA, 31 bp, artificial sequence
  misc_feature: DNAzyme
gctcgccaggctagctacaacgaactcggcc

SEQ ID NO: 8601 - DNA, 31 bp, artificial sequence
  misc_feature: DNAzyme
tatgctcgggctagctacaacgacatactcg

SEQ ID NO: 8602 - DNA, 31 bp, artificial sequence
  misc_feature: DNAzyme
aaattatgggctagctacaacgatcgccata

SEQ ID NO: 8603 - DNA, 31 bp, artificial sequence
  misc_feature: DNAzyme
caaaattaggctagctacaacgagctcgcca

SEQ ID NO: 8604 - DNA, 31 bp, artificial sequence
  misc_feature: DNAzyme
caccaaaaggctagctacaacgatatgctcg

SEQ ID NO: 8605 - DNA, 31 bp, artificial sequence
  misc_feature: DNAzyme
tgacatcaggctagctacaacgacaaaatta

SEQ ID NO: 8606 - DNA, 31 bp, artificial sequence
  misc_feature: DNAzyme
ctttgacaggctagctacaacgacaccaaaa

SEQ ID NO: 8607 - DNA, 31 bp, artificial sequence
  misc_feature: DNAzyme
atctttgaggctagctacaacgaatcaccaa

SEQ ID NO: 8608 - DNA, 31 bp, artificial sequence
  misc_feature: DNAzyme
agagctaaggctagctacaacgactttgaca

SEQ ID NO: 8609 - DNA, 31 bp, artificial sequence
  misc_feature: DNAzyme
acccagagggctagctacaacgataatcttt

SEQ ID NO: 8610 - DNA, 31 bp, artificial sequence
  misc_feature: DNAzyme
gtggtccaggctagctacaacgaccagagct

SEQ ID NO: 8611 - DNA, 31 bp, artificial sequence
  misc_feature: DNAzyme
gtgtgtggggctagctacaacgaccacccag

SEQ ID NO: 8612 - DNA, 31 bp, artificial sequence
  misc_feature: DNAzyme
cacgtgtgggctagctacaacgaggtccacc

SEQ ID NO: 8613 - DNA, 31 bp, artificial sequence
  misc_feature: DNAzyme
ctcacgtgggctagctacaacgagtggtcca

SEQ ID NO: 8614 - DNA, 31 bp, artificial sequence
  misc_feature: DNAzyme
tcctcacgggctagctacaacgagtgtggtc

SEQ ID NO: 8615 - DNA, 31 bp, artificial sequence
  misc_feature: DNAzyme
tctcctcaggctagctacaacgagtgtgtgg

SEQ ID NO: 8616 - DNA, 31 bp, artificial sequence
  misc_feature: DNAzyme
tgccatcaggctagctacaacgatctcctca

SEQ ID NO: 8617 - DNA, 31 bp, artificial sequence
  misc_feature: DNAzyme
cggtgccaggctagctacaacgacattctcc

SEQ ID NO: 8618 - DNA, 31 bp, artificial sequence
  misc_feature: DNAzyme
gcgcggtgggctagctacaacgacatcattc

SEQ ID NO: 8619 - DNA, 31 bp, artificial sequence
  misc_feature: DNAzyme
gggcgcggggctagctacaacgagccatcat

SEQ ID NO: 8620 - DNA, 31 bp, artificial sequence
  misc_feature: DNAzyme
ggggggcgggctagctacaacgaggtgccat

SEQ ID NO: 8621 - DNA, 31 bp, artificial sequence
  misc_feature: DNAzyme
ggggggggggctagctacaacgagcggtgcc

SEQ ID NO: 8622 - DNA, 31 bp, artificial sequence
  misc_feature: DNAzyme
cctcaacgggctagctacaacgatcgggggg

SEQ ID NO: 8623 - DNA, 31 bp, artificial sequence
  misc_feature: DNAzyme
cccctcaaggctagctacaacgagttcgggg

SEQ ID NO: 8624 - DNA, 31 bp, artificial sequence
  misc_feature: DNAzyme
agtgtggaggctagctacaacgacccccccc

SEQ ID NO: 8625 - DNA, 31 bp, artificial sequence
  misc_feature: DNAzyme
tgcaagtgggctagctacaacgaggatcccc

SEQ ID NO: 8626 - DNA, 31 bp, artificial sequence
  misc_feature: DNAzyme
gttgcaagggctagctacaacgagtggatcc

SEQ ID NO: 8627 - DNA, 31 bp, artificial sequence
  misc_feature: DNAzyme
cgcagttgggctagctacaacgaaagtgtgg

SEQ ID NO: 8628 - DNA, 31 bp, artificial sequence
  misc_feature: DNAzyme
aggcgcagggctagctacaacgatgcaagtg

SEQ ID NO: 8629 - DNA, 31 bp, artificial sequence
  misc_feature: DNAzyme
ccgaggcgggctagctacaacgaagttgcaa

SEQ ID NO: 8630 - DNA, 31 bp, artificial sequence
  misc_feature: DNAzyme
agccgaggggctagctacaacgagcagttgc

SEQ ID NO: 8631 - DNA, 31 bp, artificial sequence
  misc_feature: DNAzyme
caccagagggctagctacaacgacgaggcgc

SEQ ID NO: 8632 - DNA, 31 bp, artificial sequence
  misc_feature: DNAzyme
ccttatcaggctagctacaacgacagagccg

SEQ ID NO: 8633 - DNA, 31 bp, artificial sequence
  misc_feature: DNAzyme
ataccttaggctagctacaacgacaccagag

SEQ ID NO: 8634 - DNA, 31 bp, artificial sequence
  misc_feature: DNAzyme
ttgcaataggctagctacaacgacttatcac

SEQ ID NO: 8635 - DNA, 31 bp, artificial sequence
  misc_feature: DNAzyme
ggttgcaaggctagctacaacgaaccttatc

SEQ ID NO: 8636 - DNA, 31 bp, artificial sequence
  misc_feature: DNAzyme
ggtggttgggctagctacaacgaaatacctt

SEQ ID NO: 8637 - DNA, 31 bp, artificial sequence
  misc_feature: DNAzyme
tatggtggggctagctacaacgatgcaatac

SEQ ID NO: 8638 - DNA, 31 bp, artificial sequence
  misc_feature: DNAzyme
tcatatggggctagctacaacgaggttgcaa

SEQ ID NO: 8639 - DNA, 31 bp, artificial sequence
  misc_feature: DNAzyme
ggctcataggctagctacaacgaggtggttg

SEQ ID NO: 8640 - DNA, 31 bp, artificial sequence
  misc_feature: DNAzyme
taggctcaggctagctacaacgaatggtggt

SEQ ID NO: 8641 - DNA, 31 bp, artificial sequence
  misc_feature: DNAzyme
tcgctaggggctagctacaacgatcatatgg

SEQ ID NO: 8642 - DNA, 31 bp, artificial sequence
  misc_feature: DNAzyme
gttcctcgggctagctacaacgataggctca

SEQ ID NO: 8643 - DNA, 31 bp, artificial sequence
  misc_feature: DNAzyme
acaaagtgggctagctacaacgatcctcgct

SEQ ID NO: 8644 - DNA, 31 bp, artificial sequence
  misc_feature: DNAzyme
ctacaaagggctagctacaacgagttcctcg

SEQ ID NO: 8645 - DNA, 31 bp, artificial sequence
  misc_feature: DNAzyme
ccatactaggctagctacaacgaaaagtgtt

SEQ ID NO: 8646 - DNA, 31 bp, artificial sequence
  misc_feature: DNAzyme
tcaccataggctagctacaacgatacaaagt

SEQ ID NO: 8647 - DNA, 31 bp, artificial sequence
  misc_feature: DNAzyme
tgtcaccaggctagctacaacgaactacaaa

SEQ ID NO: 8648 - DNA, 31 bp, artificial sequence
  misc_feature: DNAzyme
ccttgtcaggctagctacaacgacatactac

SEQ ID NO: 8649 - DNA, 31 bp, artificial sequence
  misc_feature: DNAzyme
tgaccttgggctagctacaacgacaccatac

SEQ ID NO: 8650 - DNA, 31 bp, artificial sequence
  misc_feature: DNAzyme
actcttgaggctagctacaacgacttgtcac

SEQ ID NO: 8651 - DNA, 31 bp, artificial sequence
  misc_feature: DNAzyme
gtctagcaggctagctacaacgatcttgacc

SEQ ID NO: 8652 - DNA, 31 bp, artificial sequence
  misc_feature: DNAzyme
aggtctagggctagctacaacgaactcttga

SEQ ID NO: 8653 - DNA, 31 bp, artificial sequence
  misc_feature: DNAzyme
tttgtaggggctagctacaacgactagcact

SEQ ID NO: 8654 - DNA, 31 bp, artificial sequence
  misc_feature: DNAzyme
ggtttttgggctagctacaacgaaggtctag

SEQ ID NO: 8655 - DNA, 31 bp, artificial sequence
  misc_feature: DNAzyme
aggcgtggggctagctacaacgattttgtag

SEQ ID NO: 8656 - DNA, 31 bp, artificial sequence
  misc_feature: DNAzyme
cggaggcgggctagctacaacgaggtttttg

SEQ ID NO: 8657 - DNA, 31 bp, artificial sequence
  misc_feature: DNAzyme
tgcggaggggctagctacaacgagtggtttt

SEQ ID NO: 8658 - DNA, 31 bp, artificial sequence
  misc_feature: DNAzyme
gcatcgtgggctagctacaacgaggaggcgt

SEQ ID NO: 8659 - DNA, 31 bp, artificial sequence
  misc_feature: DNAzyme
ccgcatcgggctagctacaacgagcggaggc

SEQ ID NO: 8660 - DNA, 31 bp, artificial sequence
  misc_feature: DNAzyme
tggccgcaggctagctacaacgacgtgcgga

SEQ ID NO: 8661 - DNA, 31 bp, artificial sequence
  misc_feature: DNAzyme
gatggccgggctagctacaacgaatcgtgcg

SEQ ID NO: 8662 - DNA, 31 bp, artificial sequence
  misc_feature: DNAzyme
ggagatggggctagctacaacgacgcatcgt

SEQ ID NO: 8663 - DNA, 31 bp, artificial sequence
  misc_feature: DNAzyme
ccgggagaggctagctacaacgaggccgcat

SEQ ID NO: 8664 - DNA, 31 bp, artificial sequence
  misc_feature: DNAzyme
gccatggaggctagctacaacgacgggagat

SEQ ID NO: 8665 - DNA, 31 bp, artificial sequence
  misc_feature: DNAzyme
gtacgccaggctagctacaacgaggaccggg

SEQ ID NO: 8666 - DNA, 31 bp, artificial sequence
  misc_feature: DNAzyme
ggcgtacgggctagctacaacgacatggacc

SEQ ID NO: 8667 - DNA, 31 bp, artificial sequence
  misc_feature: DNAzyme
cgggcgtaggctagctacaacgagccatgga

SEQ ID NO: 8668 - DNA, 31 bp, artificial sequence
  misc_feature: DNAzyme
cacgggcgggctagctacaacgaacgccatg

SEQ ID NO: 8669 - DNA, 31 bp, artificial sequence
  misc_feature: DNAzyme
accacgggggctagctacaacgagtacgcca

SEQ ID NO: 8670 - DNA, 31 bp, artificial sequence
  misc_feature: DNAzyme
taccaccaggctagctacaacgagggcgtac

SEQ ID NO: 8671 - DNA, 31 bp, artificial sequence
  misc_feature: DNAzyme
cgttaccaggctagctacaacgacacgggcg

SEQ ID NO: 8672 - DNA, 31 bp, artificial sequence
  misc_feature: DNAzyme
tggcgttaggctagctacaacgacaccacgg

SEQ ID NO: 8673 - DNA, 31 bp, artificial sequence
  misc_feature: DNAzyme
tgctggcgggctagctacaacgataccacca

SEQ ID NO: 8674 - DNA, 31 bp, artificial sequence
  misc_feature: DNAzyme
cctgctggggctagctacaacgagttaccac

SEQ ID NO: 8675 - DNA, 31 bp, artificial sequence
  misc_feature: DNAzyme
tgctcctgggctagctacaacgatggcgtta

SEQ ID NO: 8676 - DNA, 31 bp, artificial sequence
  misc_feature: DNAzyme
tactcctgggctagctacaacgatcctgctg

SEQ ID NO: 8677 - DNA, 31 bp, artificial sequence
  misc_feature: DNAzyme
ggccgctaggctagctacaacgatcctgctc

SEQ ID NO: 8678 - DNA, 31 bp, artificial sequence
  misc_feature: DNAzyme
tatggccgggctagctacaacgatactcctg

SEQ ID NO: 8679 - DNA, 31 bp, artificial sequence
  misc_feature: DNAzyme
gcgtatggggctagctacaacgacgctactc

SEQ ID NO: 8680 - DNA, 31 bp, artificial sequence
  misc_feature: DNAzyme
acggcgtaggctagctacaacgaggccgcta

SEQ ID NO: 8681 - DNA, 31 bp, artificial sequence
  misc_feature: DNAzyme
ctacggcgggctagctacaacgaatggccgc

SEQ ID NO: 8682 - DNA, 31 bp, artificial sequence
  misc_feature: DNAzyme
ctctacggggctagctacaacgagtatggcc

SEQ ID NO: 8683 - DNA, 31 bp, artificial sequence
  misc_feature: DNAzyme
gctctctaggctagctacaacgaggcgtatg

SEQ ID NO: 8684 - DNA, 31 bp, artificial sequence
  misc_feature: DNAzyme
ggcatatgggctagctacaacgatctctacg

SEQ ID NO: 8685 - DNA, 31 bp, artificial sequence
  misc_feature: DNAzyme
gcggcataggctagctacaacgagctctcta

SEQ ID NO: 8686 - DNA, 31 bp, artificial sequence
  misc_feature: DNAzyme
gggcggcaggctagctacaacgaatgctctc

SEQ ID NO: 8687 - DNA, 31 bp, artificial sequence
  misc_feature: DNAzyme
tggggcggggctagctacaacgaatatgctc

SEQ ID NO: 8688 - DNA, 31 bp, artificial sequence
  misc_feature: DNAzyme
ccctggggggctagctacaacgaggcatatg

SEQ ID NO: 8689 - DNA, 31 bp, artificial sequence
  misc_feature: DNAzyme
caagctggggctagctacaacgaccctgggg

SEQ ID NO: 8690 - DNA, 31 bp, artificial sequence
  misc_feature: DNAzyme
aaggcaagggctagctacaacgatggtccct

SEQ ID NO: 8691 - DNA, 31 bp, artificial sequence
  misc_feature: DNAzyme
atcaaaggggctagctacaacgaaagctggt

SEQ ID NO: 8692 - DNA, 31 bp, artificial sequence
  misc_feature: DNAzyme
ctggtacaggctagctacaacgacaaaggca

SEQ ID NO: 8693 - DNA, 31 bp, artificial sequence
  misc_feature: DNAzyme
gcctggtaggctagctacaacgaatcaaagg

SEQ ID NO: 8694 - DNA, 31 bp, artificial sequence
  misc_feature: DNAzyme
ctgcctggggctagctacaacgaacatcaaa

SEQ ID NO: 8695 - DNA, 31 bp, artificial sequence
  misc_feature: DNAzyme
ctgtgctgggctagctacaacgactggtaca

SEQ ID NO: 8696 - DNA, 31 bp, artificial sequence
  misc_feature: DNAzyme
cttctgtgggctagctacaacgatgcctggt

SEQ ID NO: 8697 - DNA, 31 bp, artificial sequence
  misc_feature: DNAzyme
ttcttctgggctagctacaacgagctgcctg

SEQ ID NO: 8698 - DNA, 31 bp, artificial sequence
  misc_feature: DNAzyme
tcctcgtgggctagctacaacgatcttctgt

SEQ ID NO: 8699 - DNA, 31 bp, artificial sequence
  misc_feature: DNAzyme
cttcctcgggctagctacaacgagttcttct

SEQ ID NO: 8700 - DNA, 31 bp, artificial sequence
  misc_feature: DNAzyme
gcatggcaggctagctacaacgacctctcct

SEQ ID NO: 8701 - DNA, 31 bp, artificial sequence
  misc_feature: DNAzyme
gtgcatggggctagctacaacgaatcctctc

SEQ ID NO: 8702 - DNA, 31 bp, artificial sequence
  misc_feature: DNAzyme
ggagtgcaggctagctacaacgaggcatcct

SEQ ID NO: 8703 - DNA, 31 bp, artificial sequence
  misc_feature: DNAzyme
ccggagtgggctagctacaacgaatggcatc

SEQ ID NO: 8704 - DNA, 31 bp, artificial sequence
  misc_feature: DNAzyme
ggccggagggctagctacaacgagcatggca

SEQ ID NO: 8705 - DNA, 31 bp, artificial sequence
  misc_feature: DNAzyme
atccttggggctagctacaacgacggagtgc

SEQ ID NO: 8706 - DNA, 31 bp, artificial sequence
  misc_feature: DNAzyme
atgcagcaggctagctacaacgaccttggcc

SEQ ID NO: 8707 - DNA, 31 bp, artificial sequence
  misc_feature: DNAzyme
caatgcagggctagctacaacgaatccttgg

SEQ ID NO: 8708 - DNA, 31 bp, artificial sequence
  misc_feature: DNAzyme
cctcaatgggctagctacaacgaagcatcct

SEQ ID NO: 8709 - DNA, 31 bp, artificial sequence
  misc_feature: DNAzyme
gtcctcaaggctagctacaacgagcagcatc

SEQ ID NO: 8710 - DNA, 31 bp, artificial sequence
  misc_feature: DNAzyme
cctggtggggctagctacaacgacctcaatg

SEQ ID NO: 8711 - DNA, 31 bp, artificial sequence
  misc_feature: DNAzyme
gaacctggggctagctacaacgaggtcctca

SEQ ID NO: 8712 - DNA, 31 bp, artificial sequence
  misc_feature: DNAzyme
ctagagaaggctagctacaacgactggtggt

SEQ ID NO: 8713 - DNA, 31 bp, artificial sequence
  misc_feature: DNAzyme
cgaggctgggctagctacaacgacctagaga

SEQ ID NO: 8714 - DNA, 31 bp, artificial sequence
  misc_feature: DNAzyme
ggccgaggggctagctacaacgatgccctag

SEQ ID NO: 8715 - DNA, 31 bp, artificial sequence
  misc_feature: DNAzyme
agcccaggggctagctacaacgacgaggctg

SEQ ID NO: 8716 - DNA, 31 bp, artificial sequence
  misc_feature: DNAzyme
gttggtagggctagctacaacgaccaggccg

SEQ ID NO: 8717 - DNA, 31 bp, artificial sequence
  misc_feature: DNAzyme
gctgttggggctagctacaacgaagcccagg

SEQ ID NO: 8718 - DNA, 31 bp, artificial sequence
  misc_feature: DNAzyme
tgatgctgggctagctacaacgatggtagcc

SEQ ID NO: 8719 - DNA, 31 bp, artificial sequence
  misc_feature: DNAzyme
ggatgatgggctagctacaacgatgttggta

SEQ ID NO: 8720 - DNA, 31 bp, artificial sequence
  misc_feature: DNAzyme
gtggatgaggctagctacaacgagctgttgg

SEQ ID NO: 8721 - DNA, 31 bp, artificial sequence
  misc_feature: DNAzyme
tttgtggaggctagctacaacgagatgctgt

SEQ ID NO: 8722 - DNA, 31 bp, artificial sequence
  misc_feature: DNAzyme
cctgtttgggctagctacaacgaggatgatg

SEQ ID NO: 8723 - DNA, 31 bp, artificial sequence
  misc_feature: DNAzyme
tgtgcctgggctagctacaacgattgtggat

SEQ ID NO: 8724 - DNA, 31 bp, artificial sequence
  misc_feature: DNAzyme
cgtctgtgggctagctacaacgactgtttgt

SEQ ID NO: 8725 - DNA, 31 bp, artificial sequence
  misc_feature: DNAzyme
cgcgtctgggctagctacaacgagcctgttt

SEQ ID NO: 8726 - DNA, 31 bp, artificial sequence
  misc_feature: DNAzyme
cgcgcgcgggctagctacaacgactgtgcct

SEQ ID NO: 8727 - DNA, 31 bp, artificial sequence
  misc_feature: DNAzyme
gacgcgcgggctagctacaacgagtctgtgc

SEQ ID NO: 8728 - DNA, 31 bp, artificial sequence
  misc_feature: DNAzyme
cagacgcgggctagctacaacgagcgtctgt

SEQ ID NO: 8729 - DNA, 31 bp, artificial sequence
  misc_feature: DNAzyme
ggcagacgggctagctacaacgagcgcgtct

SEQ ID NO: 8730 - DNA, 31 bp, artificial sequence
  misc_feature: DNAzyme
ctggcagaggctagctacaacgagcgcgcgt

SEQ ID NO: 8731 - DNA, 31 bp, artificial sequence
  misc_feature: DNAzyme
tctcctggggctagctacaacgaagacgcgc

SEQ ID NO: 8732 - DNA, 31 bp, artificial sequence
  misc_feature: DNAzyme
tcctgttgggctagctacaacgattttcctt

SEQ ID NO: 8733 - DNA, 31 bp, artificial sequence
  misc_feature: DNAzyme
atgtcctgggctagctacaacgatgcttttc

SEQ ID NO: 8734 - DNA, 31 bp, artificial sequence
  misc_feature: DNAzyme
ggagtatgggctagctacaacgacctgttgc

SEQ ID NO: 8735 - DNA, 31 bp, artificial sequence
  misc_feature: DNAzyme
tgggagtaggctagctacaacgagtcctgtt

SEQ ID NO: 8736 - DNA, 31 bp, artificial sequence
  misc_feature: DNAzyme
aatgggagggctagctacaacgaatgtcctg

SEQ ID NO: 8737 - DNA, 31 bp, artificial sequence
  misc_feature: DNAzyme
caatcaaaggctagctacaacgagggagtat

SEQ ID NO: 8738 - DNA, 31 bp, artificial sequence
  misc_feature: DNAzyme
cttcgcaaggctagctacaacgacaaatggg

SEQ ID NO: 8739 - DNA, 31 bp, artificial sequence
  misc_feature: DNAzyme
ctccttcgggctagctacaacgaaatcaaat

SEQ ID NO: 8740 - DNA, 31 bp, artificial sequence
  misc_feature: DNAzyme
agcggttgggctagctacaacgactccttcg

SEQ ID NO: 8741 - DNA, 31 bp, artificial sequence
  misc_feature: DNAzyme
gtcagcggggctagctacaacgatgtctcct

SEQ ID NO: 8742 - DNA, 31 bp, artificial sequence
  misc_feature: DNAzyme
agggtcagggctagctacaacgaggttgtct

SEQ ID NO: 8743 - DNA, 31 bp, artificial sequence
  misc_feature: DNAzyme
gtgtagggggctagctacaacgacagcggtt

SEQ ID NO: 8744 - DNA, 31 bp, artificial sequence
  misc_feature: DNAzyme
gtacggtgggctagctacaacgaagggtcag

SEQ ID NO: 8745 - DNA, 31 bp, artificial sequence
  misc_feature: DNAzyme
ctgtacggggctagctacaacgagtagggtc

SEQ ID NO: 8746 - DNA, 31 bp, artificial sequence
  misc_feature: DNAzyme
tacctgtaggctagctacaacgaggtgtagg

SEQ ID NO: 8747 - DNA, 31 bp, artificial sequence
  misc_feature: DNAzyme
aatacctgggctagctacaacgaacggtgta

SEQ ID NO: 8748 - DNA, 31 bp, artificial sequence
  misc_feature: DNAzyme
gtgcaataggctagctacaacgactgtacgg

SEQ ID NO: 8749 - DNA, 31 bp, artificial sequence
  misc_feature: DNAzyme
acgtgcaaggctagctacaacgaacctgtac

SEQ ID NO: 8750 - DNA, 31 bp, artificial sequence
  misc_feature: DNAzyme
tggacgtgggctagctacaacgaaatacctg

SEQ ID NO: 8751 - DNA, 31 bp, artificial sequence
  misc_feature: DNAzyme
cgtggacgggctagctacaacgagcaatacc

SEQ ID NO: 8752 - DNA, 31 bp, artificial sequence
  misc_feature: DNAzyme
atcgtggaggctagctacaacgagtgcaata

SEQ ID NO: 8753 - DNA, 31 bp, artificial sequence
  misc_feature: DNAzyme
gaacatcgggctagctacaacgaggacgtgc

SEQ ID NO: 8754 - DNA, 31 bp, artificial sequence
  misc_feature: DNAzyme
ccagaacaggctagctacaacgacgtggacg

SEQ ID NO: 8755 - DNA, 31 bp, artificial sequence
  misc_feature: DNAzyme
caccagaaggctagctacaacgaatcgtgga

SEQ ID NO: 8756 - DNA, 31 bp, artificial sequence
  misc_feature: DNAzyme
catctccaggctagctacaacgacagaacat

SEQ ID NO: 8757 - DNA, 31 bp, artificial sequence
  misc_feature: DNAzyme
ttgatccaggctagctacaacgactccacca

SEQ ID NO: 8758 - DNA, 31 bp, artificial sequence
  misc_feature: DNAzyme
tggtttgaggctagctacaacgaccatctcc

SEQ ID NO: 8759 - DNA, 31 bp, artificial sequence
  misc_feature: DNAzyme
tccactggggctagctacaacgattgatcca

SEQ ID NO: 8760 - DNA, 31 bp, artificial sequence
  misc_feature: DNAzyme
tctgtccaggctagctacaacgatggtttga

SEQ ID NO: 8761 - DNA, 31 bp, artificial sequence
  misc_feature: DNAzyme
cggctctgggctagctacaacgaccactggt

SEQ ID NO: 8762 - DNA, 31 bp, artificial sequence
  misc_feature: DNAzyme
cctaccggggctagctacaacgatctgtcca

SEQ ID NO: 8763 - DNA, 31 bp, artificial sequence
  misc_feature: DNAzyme
ccaccctaggctagctacaacgacggctctg

SEQ ID NO: 8764 - DNA, 31 bp, artificial sequence
  misc_feature: DNAzyme
cttcaccaggctagctacaacgacctaccgg

SEQ ID NO: 8765 - DNA, 31 bp, artificial sequence
  misc_feature: DNAzyme
ctccttcaggctagctacaacgacaccctac

SEQ ID NO: 8766 - DNA, 31 bp, artificial sequence
  misc_feature: DNAzyme
ctgccctgggctagctacaacgatccttcac

SEQ ID NO: 8767 - DNA, 31 bp, artificial sequence
  misc_feature: DNAzyme
aaatactgggctagctacaacgacctgctcc

SEQ ID NO: 8768 - DNA, 31 bp, artificial sequence
  misc_feature: DNAzyme
ggcaaataggctagctacaacgatgccctgc

SEQ ID NO: 8769 - DNA, 31 bp, artificial sequence
  misc_feature: DNAzyme
gtggcaaaggctagctacaacgaactgccct

SEQ ID NO: 8770 - DNA, 31 bp, artificial sequence
  misc_feature: DNAzyme
cagagtggggctagctacaacgaaaatactg

SEQ ID NO: 8771 - DNA, 31 bp, artificial sequence
  misc_feature: DNAzyme
ctacagagggctagctacaacgaggcaaata

SEQ ID NO: 8772 - DNA, 31 bp, artificial sequence
  misc_feature: DNAzyme
gtccactaggctagctacaacgaagagtggc

SEQ ID NO: 8773 - DNA, 31 bp, artificial sequence
  misc_feature: DNAzyme
gttgtccaggctagctacaacgatacagagt

SEQ ID NO: 8774 - DNA, 31 bp, artificial sequence
  misc_feature: DNAzyme
tgctgttgggctagctacaacgaccactaca

SEQ ID NO: 8775 - DNA, 31 bp, artificial sequence
  misc_feature: DNAzyme
cgctgctgggctagctacaacgatgtccact

SEQ ID NO: 8776 - DNA, 31 bp, artificial sequence
  misc_feature: DNAzyme
gcccgctgggctagctacaacgatgttgtcc

SEQ ID NO: 8777 - DNA, 31 bp, artificial sequence
  misc_feature: DNAzyme
tcagcccgggctagctacaacgatgctgttg

SEQ ID NO: 8778 - DNA, 31 bp, artificial sequence
  misc_feature: DNAzyme
gagctcagggctagctacaacgaccgctgct

SEQ ID NO: 8779 - DNA, 31 bp, artificial sequence
  misc_feature: DNAzyme
gatcagagggctagctacaacgatcagcccg

SEQ ID NO: 8780 - DNA, 31 bp, artificial sequence
  misc_feature: DNAzyme
gggacagaggctagctacaacgacagagctc

SEQ ID NO: 8781 - DNA, 31 bp, artificial sequence
  misc_feature: DNAzyme
gacagggaggctagctacaacgaagatcaga

SEQ ID NO: 8782 - DNA, 31 bp, artificial sequence
  misc_feature: DNAzyme
ttggaggaggctagctacaacgaagggacag

SEQ ID NO: 8783 - DNA, 31 bp, artificial sequence
  misc_feature: DNAzyme
cgttgtgaggctagctacaacgattggagga

SEQ ID NO: 8784 - DNA, 31 bp, artificial sequence
  misc_feature: DNAzyme
gagcgttgggctagctacaacgagatttgga

SEQ ID NO: 8785 - DNA, 31 bp, artificial sequence
  misc_feature: DNAzyme
ggagagcgggctagctacaacgatgtgattt

SEQ ID NO: 8786 - DNA, 31 bp, artificial sequence
  misc_feature: DNAzyme
gaggagagggctagctacaacgagttgtgat

SEQ ID NO: 8787 - DNA, 31 bp, artificial sequence
  misc_feature: DNAzyme
caattggaggctagctacaacgatcgaggag

SEQ ID NO: 8788 - DNA, 31 bp, artificial sequence
  misc_feature: DNAzyme
gcatgcaaggctagctacaacgatggactcg

SEQ ID NO: 8789 - DNA, 31 bp, artificial sequence
  misc_feature: DNAzyme
gccgcatgggctagctacaacgaaattggac

SEQ ID NO: 8790 - DNA, 31 bp, artificial sequence
  misc_feature: DNAzyme
ccgccgcaggctagctacaacgagcaattgg

SEQ ID NO: 8791 - DNA, 31 bp, artificial sequence
  misc_feature: DNAzyme
caccgccgggctagctacaacgaatgcaatt

SEQ ID NO: 8792 - DNA, 31 bp, artificial sequence
  misc_feature: DNAzyme
gctcaccgggctagctacaacgacgcatgca

SEQ ID NO: 8793 - DNA, 31 bp, artificial sequence
  misc_feature: DNAzyme
caggctcaggctagctacaacgacgccgcat

SEQ ID NO: 8794 - DNA, 31 bp, artificial sequence
  misc_feature: DNAzyme
agcacaggggctagctacaacgatcaccgcc

SEQ ID NO: 8795 - DNA, 31 bp, artificial sequence
  misc_feature: DNAzyme
gtggagcaggctagctacaacgaaggctcac

SEQ ID NO: 8796 - DNA, 31 bp, artificial sequence
  misc_feature: DNAzyme
gcgtggagggctagctacaacgaacaggctc

SEQ ID NO: 8797 - DNA, 31 bp, artificial sequence
  misc_feature: DNAzyme
ggggggcgggctagctacaacgaggagcaca

SEQ ID NO: 8798 - DNA, 31 bp, artificial sequence
  misc_feature: DNAzyme
gtggggggggctagctacaacgagtggagca

SEQ ID NO: 8799 - DNA, 31 bp, artificial sequence
  misc_feature: DNAzyme
gatgtatgggctagctacaacgaggggggcg

SEQ ID NO: 8800 - DNA, 31 bp, artificial sequence
  misc_feature: DNAzyme
aggatgtaggctagctacaacgagtgggggg

SEQ ID NO: 8801 - DNA, 31 bp, artificial sequence
  misc_feature: DNAzyme
ttaggatgggctagctacaacgaatgtgggg

SEQ ID NO: 8802 - DNA, 31 bp, artificial sequence
  misc_feature: DNAzyme
ggttaggaggctagctacaacgagtatgtgg

SEQ ID NO: 8803 - DNA, 31 bp, artificial sequence
  misc_feature: DNAzyme
ctttaaggggctagctacaacgataggatgt

SEQ ID NO: 8804 - DNA, 31 bp, artificial sequence
  misc_feature: DNAzyme
tttttccaggctagctacaacgactttaagg

SEQ ID NO: 8805 - DNA, 31 bp, artificial sequence
  misc_feature: DNAzyme
actgtcaaggctagctacaacgattttccat

SEQ ID NO: 8806 - DNA, 31 bp, artificial sequence
  misc_feature: DNAzyme
ctgcactgggctagctacaacgacaattttt

SEQ ID NO: 8807 - DNA, 31 bp, artificial sequence
  misc_feature: DNAzyme
cccctgcaggctagctacaacgatgtcaatt

SEQ ID NO: 8808 - DNA, 31 bp, artificial sequence
  misc_feature: DNAzyme
tacccctgggctagctacaacgaactgtcaa

SEQ ID NO: 8809 - DNA, 31 bp, artificial sequence
  misc_feature: DNAzyme
tggcactaggctagctacaacgaccctgcac

SEQ ID NO: 8810 - DNA, 31 bp, artificial sequence
  misc_feature: DNAzyme
ctttggcaggctagctacaacgatacccctg

SEQ ID NO: 8811 - DNA, 31 bp, artificial sequence
  misc_feature: DNAzyme
ggctttggggctagctacaacgaactacccc

SEQ ID NO: 8812 - DNA, 31 bp, artificial sequence
  misc_feature: DNAzyme
catacaggggctagctacaacgatttggcac

SEQ ID NO: 8813 - DNA, 31 bp, artificial sequence
  misc_feature: DNAzyme
tacccataggctagctacaacgaaggctttg

SEQ ID NO: 8814 - DNA, 31 bp, artificial sequence
  misc_feature: DNAzyme
actacccaggctagctacaacgaacaggctt

SEQ ID NO: 8815 - DNA, 31 bp, artificial sequence
  misc_feature: DNAzyme
gttgactaggctagctacaacgaccatacag

SEQ ID NO: 8816 - DNA, 31 bp, artificial sequence
  misc_feature: DNAzyme
atagttgaggctagctacaacgatacccata

SEQ ID NO: 8817 - DNA, 31 bp, artificial sequence
  misc_feature: DNAzyme
atgcatagggctagctacaacgatgactacc

SEQ ID NO: 8818 - DNA, 31 bp, artificial sequence
  misc_feature: DNAzyme
tagatgcaggctagctacaacgaagttgact

SEQ ID NO: 8819 - DNA, 31 bp, artificial sequence
  misc_feature: DNAzyme
cctagatgggctagctacaacgaatagttga

SEQ ID NO: 8820 - DNA, 31 bp, artificial sequence
  misc_feature: DNAzyme
cacctagaggctagctacaacgagcatagtt

SEQ ID NO: 8821 - DNA, 31 bp, artificial sequence
  misc_feature: DNAzyme
ggttaacaggctagctacaacgactagatgc

SEQ ID NO: 8822 - DNA, 31 bp, artificial sequence
  misc_feature: DNAzyme
ttggttaaggctagctacaacgaacctagat

SEQ ID NO: 8823 - DNA, 31 bp, artificial sequence
  misc_feature: DNAzyme
ggccttggggctagctacaacgataacacct

SEQ ID NO: 8824 - DNA, 31 bp, artificial sequence
  misc_feature: DNAzyme
gttcggggggctagctacaacgacttggtta

SEQ ID NO: 8825 - DNA, 31 bp, artificial sequence
  misc_feature: DNAzyme
aagtgcggggctagctacaacgatcggggcc

SEQ ID NO: 8826 - DNA, 31 bp, artificial sequence
  misc_feature: DNAzyme
gcaaagtgggctagctacaacgaggttcggg

SEQ ID NO: 8827 - DNA, 31 bp, artificial sequence
  misc_feature: DNAzyme
acgcaaagggctagctacaacgagcggttcg

SEQ ID NO: 8828 - DNA, 31 bp, artificial sequence
  misc_feature: DNAzyme
cacttacgggctagctacaacgaaaagtgcg

SEQ ID NO: 8829 - DNA, 31 bp, artificial sequence
  misc_feature: DNAzyme
gccacttaggctagctacaacgagcaaagtg

SEQ ID NO: 8830 - DNA, 31 bp, artificial sequence
  misc_feature: DNAzyme
cgaggccaggctagctacaacgattacgcaa

SEQ ID NO: 8831 - DNA, 31 bp, artificial sequence
  misc_feature: DNAzyme
ccccgaggggctagctacaacgacacttacg

SEQ ID NO: 8832 - DNA, 31 bp, artificial sequence
  misc_feature: DNAzyme
cggaagcaggctagctacaacgacccgaggc

SEQ ID NO: 8833 - DNA, 31 bp, artificial sequence
  misc_feature: DNAzyme
tccggaagggctagctacaacgaaccccgag

SEQ ID NO: 8834 - DNA, 31 bp, artificial sequence
  misc_feature: DNAzyme
acggactgggctagctacaacgattccggaa

SEQ ID NO: 8835 - DNA, 31 bp, artificial sequence
  misc_feature: DNAzyme
cccacggaggctagctacaacgatgcttccg

SEQ ID NO: 8836 - DNA, 31 bp, artificial sequence
  misc_feature: DNAzyme
ctgccccaggctagctacaacgaggactgct

SEQ ID NO: 8837 - DNA, 31 bp, artificial sequence
  misc_feature: DNAzyme
ttaacctgggctagctacaacgacccacgga

SEQ ID NO: 8838 - DNA, 31 bp, artificial sequence
  misc_feature: DNAzyme
caccttaaggctagctacaacgactgcccca

SEQ ID NO: 8839 - DNA, 31 bp, artificial sequence
  misc_feature: DNAzyme
taacgacaggctagctacaacgacttaacct

SEQ ID NO: 8840 - DNA, 31 bp, artificial sequence
  misc_feature: DNAzyme
ggtaacgaggctagctacaacgaaccttaac

SEQ ID NO: 8841 - DNA, 31 bp, artificial sequence
  misc_feature: DNAzyme
gccggtaaggctagctacaacgagacacctt

SEQ ID NO: 8842 - DNA, 31 bp, artificial sequence
  misc_feature: DNAzyme
ggggccggggctagctacaacgaaacgacac

SEQ ID NO: 8843 - DNA, 31 bp, artificial sequence
  misc_feature: DNAzyme
cgggggggggctagctacaacgacggtaacg

SEQ ID NO: 8844 - DNA, 31 bp, artificial sequence
  misc_feature: DNAzyme
gtgcaacaggctagctacaacgacggggggg

SEQ ID NO: 8845 - DNA, 31 bp, artificial sequence
  misc_feature: DNAzyme
ccgtgcaaggctagctacaacgaatcggggg

SEQ ID NO: 8846 - DNA, 31 bp, artificial sequence
  misc_feature: DNAzyme
cccccgtgggctagctacaacgaaacatcgg

SEQ ID NO: 8847 - DNA, 31 bp, artificial sequence
  misc_feature: DNAzyme
gccccccgggctagctacaacgagcaacatc

SEQ ID NO: 8848 - DNA, 31 bp, artificial sequence
  misc_feature: DNAzyme
tgcgggggggctagctacaacgacccccgtg

SEQ ID NO: 8849 - DNA, 31 bp, artificial sequence
  misc_feature: DNAzyme
aagacgtgggctagctacaacgagggggccc

SEQ ID NO: 8850 - DNA, 31 bp, artificial sequence
  misc_feature: DNAzyme
ccaagacgggctagctacaacgagcgggggc

SEQ ID NO: 8851 - DNA, 31 bp, artificial sequence
  misc_feature: DNAzyme
caccaagaggctagctacaacgagtgcgggg

SEQ ID NO: 8852 - DNA, 31 bp, artificial sequence
  misc_feature: DNAzyme
tgggttcaggctagctacaacgacaagacgt

SEQ ID NO: 8853 - DNA, 31 bp, artificial sequence
  misc_feature: DNAzyme
gcactgggggctagctacaacgatcaccaag

SEQ ID NO: 8854 - DNA, 31 bp, artificial sequence
  misc_feature: DNAzyme
gaatggcaggctagctacaacgatgggttca

SEQ ID NO: 8855 - DNA, 31 bp, artificial sequence
  misc_feature: DNAzyme
atgaatggggctagctacaacgaactgggtt

SEQ ID NO: 8856 - DNA, 31 bp, artificial sequence
  misc_feature: DNAzyme
tggatgaaggctagctacaacgaggcactgg

SEQ ID NO: 8857 - DNA, 31 bp, artificial sequence
  misc_feature: DNAzyme
cacatggaggctagctacaacgagaatggca

SEQ ID NO: 8858 - DNA, 31 bp, artificial sequence
  misc_feature: DNAzyme
gctgcacaggctagctacaacgaggatgaat

SEQ ID NO: 8859 - DNA, 31 bp, artificial sequence
  misc_feature: DNAzyme
cggctgcaggctagctacaacgaatggatga

SEQ ID NO: 8860 - DNA, 31 bp, artificial sequence
  misc_feature: DNAzyme
ttcggctgggctagctacaacgaacatggat

SEQ ID NO: 8861 - DNA, 31 bp, artificial sequence
  misc_feature: DNAzyme
tggttcggggctagctacaacgatgcacatg

SEQ ID NO: 8862 - DNA, 31 bp, artificial sequence
  misc_feature: DNAzyme
gcaactggggctagctacaacgatcggctgc

SEQ ID NO: 8863 - DNA, 31 bp, artificial sequence
  misc_feature: DNAzyme
caaggcaaggctagctacaacgatggttcgg

SEQ ID NO: 8864 - DNA, 31 bp, artificial sequence
  misc_feature: DNAzyme
ccgcaaggggctagctacaacgaaactggtt

SEQ ID NO: 8865 - DNA, 31 bp, artificial sequence
  misc_feature: DNAzyme
ggccgccgggctagctacaacgaaaggcaac

SEQ ID NO: 8866 - DNA, 31 bp, artificial sequence
  misc_feature: DNAzyme
cgcggccgggctagctacaacgacgcaaggc

SEQ ID NO: 8867 - DNA, 31 bp, artificial sequence
  misc_feature: DNAzyme
acacgcggggctagctacaacgacgccgcaa

SEQ ID NO: 8868 - DNA, 31 bp, artificial sequence
  misc_feature: DNAzyme
acaacacgggctagctacaacgaggccgccg

SEQ ID NO: 8869 - DNA, 31 bp, artificial sequence
  misc_feature: DNAzyme
caacaacaggctagctacaacgagcggccgc

SEQ ID NO: 8870 - DNA, 31 bp, artificial sequence
  misc_feature: DNAzyme
ctcaacaaggctagctacaacgaacgcggcc

SEQ ID NO: 8871 - DNA, 31 bp, artificial sequence
  misc_feature: DNAzyme
ctcctcaaggctagctacaacgaaacacgcg

SEQ ID NO: 8872 - DNA, 31 bp, artificial sequence
  misc_feature: DNAzyme
acgtgctgggctagctacaacgatcctcaac

SEQ ID NO: 8873 - DNA, 31 bp, artificial sequence
  misc_feature: DNAzyme
cggacgtgggctagctacaacgatgctcctc

SEQ ID NO: 8874 - DNA, 31 bp, artificial sequence
  misc_feature: DNAzyme
gacggacgggctagctacaacgagctgctcc

SEQ ID NO: 8875 - DNA, 31 bp, artificial sequence
  misc_feature: DNAzyme
gagacggaggctagctacaacgagtgctgct

SEQ ID NO: 8876 - DNA, 31 bp, artificial sequence
  misc_feature: DNAzyme
gaacgagaggctagctacaacgaggacgtgc

SEQ ID NO: 8877 - DNA, 31 bp, artificial sequence
  misc_feature: DNAzyme
ggggcgaaggctagctacaacgagagacgga

SEQ ID NO: 8878 - DNA, 31 bp, artificial sequence
  misc_feature: DNAzyme
ctggggggggctagctacaacgagaacgaga

SEQ ID NO: 8879 - DNA, 31 bp, artificial sequence
  misc_feature: DNAzyme
acgtataaggctagctacaacgatggggggc

SEQ ID NO: 8880 - DNA, 31 bp, artificial sequence
  misc_feature: DNAzyme
cccacgtaggctagctacaacgaaactgggg

SEQ ID NO: 8881 - DNA, 31 bp, artificial sequence
  misc_feature: DNAzyme
cccccacgggctagctacaacgaataactgg

SEQ ID NO: 8882 - DNA, 31 bp, artificial sequence
  misc_feature: DNAzyme
cgcccccaggctagctacaacgagtataact

SEQ ID NO: 8883 - DNA, 31 bp, artificial sequence
  misc_feature: DNAzyme
tttcggcgggctagctacaacgaccccacgt

SEQ ID NO: 8884 - DNA, 31 bp, artificial sequence
  misc_feature: DNAzyme
cgtttcggggctagctacaacgagcccccac

SEQ ID NO: 8885 - DNA, 31 bp, artificial sequence
  misc_feature: DNAzyme
accgaccgggctagctacaacgattcggcgc

SEQ ID NO: 8886 - DNA, 31 bp, artificial sequence
  misc_feature: DNAzyme
acgaccgaggctagctacaacgacgtttcgg

SEQ ID NO: 8887 - DNA, 31 bp, artificial sequence
  misc_feature: DNAzyme
ggggacgaggctagctacaacgacgaccgtt

SEQ ID NO: 8888 - DNA, 31 bp, artificial sequence
  misc_feature: DNAzyme
ggtggggaggctagctacaacgagaccgacc

SEQ ID NO: 8889 - DNA, 31 bp, artificial sequence
  misc_feature: DNAzyme
tgttgtggggctagctacaacgaggggacga

SEQ ID NO: 8890 - DNA, 31 bp, artificial sequence
  misc_feature: DNAzyme
ccctgttgggctagctacaacgaggtgggga

SEQ ID NO: 8891 - DNA, 31 bp, artificial sequence
  misc_feature: DNAzyme
aagccctgggctagctacaacgatgtggtgg

SEQ ID NO: 8892 - DNA, 31 bp, artificial sequence
  misc_feature: DNAzyme
accccaagggctagctacaacgacctgttgt

SEQ ID NO: 8893 - DNA, 31 bp, artificial sequence
  misc_feature: DNAzyme
ttgcttcaggctagctacaacgacccaagcc

SEQ ID NO: 8894 - DNA, 31 bp, artificial sequence
  misc_feature: DNAzyme
gtgtattgggctagctacaacgattcacccc

SEQ ID NO: 8895 - DNA, 31 bp, artificial sequence
  misc_feature: DNAzyme
ccagtgtaggctagctacaacgatgcttcac

SEQ ID NO: 8896 - DNA, 31 bp, artificial sequence
  misc_feature: DNAzyme
gtccagtgggctagctacaacgaattgcttc

SEQ ID NO: 8897 - DNA, 31 bp, artificial sequence
  misc_feature: DNAzyme
tggtccagggctagctacaacgagtattgct

SEQ ID NO: 8898 - DNA, 31 bp, artificial sequence
  misc_feature: DNAzyme
gtatgtggggctagctacaacgaccagtgta

SEQ ID NO: 8899 - DNA, 31 bp, artificial sequence
  misc_feature: DNAzyme
caggtatgggctagctacaacgaggtccagt

SEQ ID NO: 8900 - DNA, 31 bp, artificial sequence
  misc_feature: DNAzyme
cgcaggtaggctagctacaacgagtggtcca

SEQ ID NO: 8901 - DNA, 31 bp, artificial sequence
  misc_feature: DNAzyme
atcgcaggggctagctacaacgaatgtggtc

SEQ ID NO: 8902 - DNA, 31 bp, artificial sequence
  misc_feature: DNAzyme
ccgcatcgggctagctacaacgaaggtatgt

SEQ ID NO: 8903 - DNA, 31 bp, artificial sequence
  misc_feature: DNAzyme
tacccgcaggctagctacaacgacgcaggta

SEQ ID NO: 8904 - DNA, 31 bp, artificial sequence
  misc_feature: DNAzyme
cgtacccgggctagctacaacgaatcgcagg

SEQ ID NO: 8905 - DNA, 31 bp, artificial sequence
  misc_feature: DNAzyme
gtatcgtaggctagctacaacgaccgcatcg

SEQ ID NO: 8906 - DNA, 31 bp, artificial sequence
  misc_feature: DNAzyme
tggtatcgggctagctacaacgaacccgcat

SEQ ID NO: 8907 - DNA, 31 bp, artificial sequence
  misc_feature: DNAzyme
gtgtggtaggctagctacaacgacgtacccg

SEQ ID NO: 8908 - DNA, 31 bp, artificial sequence
  misc_feature: DNAzyme
ccgtgtggggctagctacaacgaatcgtacc

SEQ ID NO: 8909 - DNA, 31 bp, artificial sequence
  misc_feature: DNAzyme
cggccgtgggctagctacaacgaggtatcgt

SEQ ID NO: 8910 - DNA, 31 bp, artificial sequence
  misc_feature: DNAzyme
cgcggccgggctagctacaacgagtggtatc

SEQ ID NO: 8911 - DNA, 31 bp, artificial sequence
  misc_feature: DNAzyme
caccgcggggctagctacaacgacgtgtggt

SEQ ID NO: 8912 - DNA, 31 bp, artificial sequence
  misc_feature: DNAzyme
acgcaccgggctagctacaacgaggccgtgt

SEQ ID NO: 8913 - DNA, 31 bp, artificial sequence
  misc_feature: DNAzyme
actacgcaggctagctacaacgacgcggccg

SEQ ID NO: 8914 - DNA, 31 bp, artificial sequence
  misc_feature: DNAzyme
gcactacgggctagctacaacgaaccgcggc

SEQ ID NO: 8915 - DNA, 31 bp, artificial sequence
  misc_feature: DNAzyme
tggcactaggctagctacaacgagcaccgcg

SEQ ID NO: 8916 - DNA, 31 bp, artificial sequence
  misc_feature: DNAzyme
tgctggcaggctagctacaacgatacgcacc

SEQ ID NO: 8917 - DNA, 31 bp, artificial sequence
  misc_feature: DNAzyme
attgctggggctagctacaacgaactacgca

SEQ ID NO: 8918 - DNA, 31 bp, artificial sequence
  misc_feature: DNAzyme
ccctattgggctagctacaacgatggcacta

SEQ ID NO: 8919 - DNA, 31 bp, artificial sequence
  misc_feature: DNAzyme
aggccctaggctagctacaacgatgctggca

SEQ ID NO: 8920 - DNA, 31 bp, artificial sequence
  misc_feature: DNAzyme
accagaggggctagctacaacgacctattgc

SEQ ID NO: 8921 - DNA, 31 bp, artificial sequence
  misc_feature: DNAzyme
aactcggaggctagctacaacgacagaggcc

SEQ ID NO: 8922 - DNA, 31 bp, artificial sequence
  misc_feature: DNAzyme
ggccacaaggctagctacaacgatcggacca

SEQ ID NO: 8923 - DNA, 31 bp, artificial sequence
  misc_feature: DNAzyme
gagggccaggctagctacaacgaaactcgga

SEQ ID NO: 8924 - DNA, 31 bp, artificial sequence
  misc_feature: DNAzyme
accgagggggctagctacaacgacacaactc

SEQ ID NO: 8925 - DNA, 31 bp, artificial sequence
  misc_feature: DNAzyme
cacctacaggctagctacaacgacgagggcc

SEQ ID NO: 8926 - DNA, 31 bp, artificial sequence
  misc_feature: DNAzyme
atcacctaggctagctacaacgaaccgaggg

SEQ ID NO: 8927 - DNA, 31 bp, artificial sequence
  misc_feature: DNAzyme
tcctatcaggctagctacaacgactacaccg

SEQ ID NO: 8928 - DNA, 31 bp, artificial sequence
  misc_feature: DNAzyme
gggtcctaggctagctacaacgacacctaca

SEQ ID NO: 8929 - DNA, 31 bp, artificial sequence
  misc_feature: DNAzyme
gggtggggggctagctacaacgacctatcac

SEQ ID NO: 8930 - DNA, 31 bp, artificial sequence
  misc_feature: DNAzyme
ctcaggggggctagctacaacgaggggtcct

SEQ ID NO: 8931 - DNA, 31 bp, artificial sequence
  misc_feature: DNAzyme
caagttcgggctagctacaacgatcaggggt

SEQ ID NO: 8932 - DNA, 31 bp, artificial sequence
  misc_feature: DNAzyme
ttgacaagggctagctacaacgatcgctcag

SEQ ID NO: 8933 - DNA, 31 bp, artificial sequence
  misc_feature: DNAzyme
tccattgaggctagctacaacgaaagttcgc

SEQ ID NO: 8934 - DNA, 31 bp, artificial sequence
  misc_feature: DNAzyme
ccgctccaggctagctacaacgatgacaagt

SEQ ID NO: 8935 - DNA, 31 bp, artificial sequence
  misc_feature: DNAzyme
agctgccgggctagctacaacgatccattga

SEQ ID NO: 8936 - DNA, 31 bp, artificial sequence
  misc_feature: DNAzyme
gccagctgggctagctacaacgacgctccat

SEQ ID NO: 8937 - DNA, 31 bp, artificial sequence
  misc_feature: DNAzyme
ttggccagggctagctacaacgatgccgctc

SEQ ID NO: 8938 - DNA, 31 bp, artificial sequence
  misc_feature: DNAzyme
gcgcttggggctagctacaacgacagctgcc

SEQ ID NO: 8939 - DNA, 31 bp, artificial sequence
  misc_feature: DNAzyme
ccacagcgggctagctacaacgattggccag

SEQ ID NO: 8940 - DNA, 31 bp, artificial sequence
  misc_feature: DNAzyme
gcccacagggctagctacaacgagcttggcc

SEQ ID NO: 8941 - DNA, 31 bp, artificial sequence
  misc_feature: DNAzyme
gatgcccaggctagctacaacgaagcgcttg

SEQ ID NO: 8942 - DNA, 31 bp, artificial sequence
  misc_feature: DNAzyme
tccggatgggctagctacaacgaccacagcg

SEQ ID NO: 8943 - DNA, 31 bp, artificial sequence
  misc_feature: DNAzyme
cgtccggaggctagctacaacgagcccacag

SEQ ID NO: 8944 - DNA, 31 bp, artificial sequence
  misc_feature: DNAzyme
tcaactcgggctagctacaacgaccggatgc

SEQ ID NO: 8945 - DNA, 31 bp, artificial sequence
  misc_feature: DNAzyme
aggttcaaggctagctacaacgatcgtccgg

SEQ ID NO: 8946 - DNA, 31 bp, artificial sequence
  misc_feature: DNAzyme
cacacaggggctagctacaacgatcaactcg

SEQ ID NO: 8947 - DNA, 31 bp, artificial sequence
  misc_feature: DNAzyme
tatgcacaggctagctacaacgaaggttcaa

SEQ ID NO: 8948 - DNA, 31 bp, artificial sequence
  misc_feature: DNAzyme
tctatgcaggctagctacaacgaacaggttc

SEQ ID NO: 8949 - DNA, 31 bp, artificial sequence
  misc_feature: DNAzyme
gttctatgggctagctacaacgaacacaggt

SEQ ID NO: 8950 - DNA, 31 bp, artificial sequence
  misc_feature: DNAzyme
ctgttctaggctagctacaacgagcacacag

SEQ ID NO: 8951 - DNA, 31 bp, artificial sequence
  misc_feature: DNAzyme
ctgcactgggctagctacaacgatctatgca

SEQ ID NO: 8952 - DNA, 31 bp, artificial sequence
  misc_feature: DNAzyme
ttgctgcaggctagctacaacgatgttctat

SEQ ID NO: 8953 - DNA, 31 bp, artificial sequence
  misc_feature: DNAzyme
cattgctgggctagctacaacgaactgttct

SEQ ID NO: 8954 - DNA, 31 bp, artificial sequence
  misc_feature: DNAzyme
gttcattgggctagctacaacgatgcactgt

SEQ ID NO: 8955 - DNA, 31 bp, artificial sequence
  misc_feature: DNAzyme
cgggttcaggctagctacaacgatgctgcac

SEQ ID NO: 8956 - DNA, 31 bp, artificial sequence
  misc_feature: DNAzyme
aaaccgggggctagctacaacgatcattgct

SEQ ID NO: 8957 - DNA, 31 bp, artificial sequence
  misc_feature: DNAzyme
cctccaaaggctagctacaacgacgggttca

SEQ ID NO: 8958 - DNA, 31 bp, artificial sequence
  misc_feature: DNAzyme
tgcaatgaggctagctacaacgatccctcca

SEQ ID NO: 8959 - DNA, 31 bp, artificial sequence
  misc_feature: DNAzyme
aactgcaaggctagctacaacgagactccct

SEQ ID NO: 8960 - DNA, 31 bp, artificial sequence
  misc_feature: DNAzyme
ctgaactgggctagctacaacgaaatgactc

SEQ ID NO: 8961 - DNA, 31 bp, artificial sequence
  misc_feature: DNAzyme
gccctgaaggctagctacaacgatgcaatga

SEQ ID NO: 8962 - DNA, 31 bp, artificial sequence
  misc_feature: DNAzyme
caggactgggctagctacaacgacctgaact

SEQ ID NO: 8963 - DNA, 31 bp, artificial sequence
  misc_feature: DNAzyme
taacaggaggctagctacaacgatgccctga

SEQ ID NO: 8964 - DNA, 31 bp, artificial sequence
  misc_feature: DNAzyme
cacattaaggctagctacaacgaaggactgc

SEQ ID NO: 8965 - DNA, 31 bp, artificial sequence
  misc_feature: DNAzyme
ctggcacaggctagctacaacgataacagga

SEQ ID NO: 8966 - DNA, 31 bp, artificial sequence
  misc_feature: DNAzyme
agctggcaggctagctacaacgaattaacag

SEQ ID NO: 8967 - DNA, 31 bp, artificial sequence
  misc_feature: DNAzyme
gcagctggggctagctacaacgaacattaac

SEQ ID NO: 8968 - DNA, 31 bp, artificial sequence
  misc_feature: DNAzyme
aacggcagggctagctacaacgatggcacat

SEQ ID NO: 8969 - DNA, 31 bp, artificial sequence
  misc_feature: DNAzyme
accaacggggctagctacaacgaagctggca

SEQ ID NO: 8970 - DNA, 31 bp, artificial sequence
  misc_feature: DNAzyme
aacaccaaggctagctacaacgaggcagctg

SEQ ID NO: 8971 - DNA, 31 bp, artificial sequence
  misc_feature: DNAzyme
tattaacaggctagctacaacgacaacggca

SEQ ID NO: 8972 - DNA, 31 bp, artificial sequence
  misc_feature: DNAzyme
cttattaaggctagctacaacgaaccaacgg

SEQ ID NO: 8973 - DNA, 31 bp, artificial sequence
  misc_feature: DNAzyme
ccagcttaggctagctacaacgataacacca

SEQ ID NO: 8974 - DNA, 31 bp, artificial sequence
  misc_feature: DNAzyme
atatccagggctagctacaacgattattaac

SEQ ID NO: 8975 - DNA, 31 bp, artificial sequence
  misc_feature: DNAzyme
tcagaataggctagctacaacgaccagctta

SEQ ID NO: 8976 - DNA, 31 bp, artificial sequence
  misc_feature: DNAzyme
tctcagaaggctagctacaacgaatccagct

SEQ ID NO: 8977 - DNA, 31 bp, artificial sequence
  misc_feature: DNAzyme
ctggagcaggctagctacaacgactcagaat

SEQ ID NO: 8978 - DNA, 31 bp, artificial sequence
  misc_feature: DNAzyme
atctggagggctagctacaacgaatctcaga

SEQ ID NO: 8979 - DNA, 31 bp, artificial sequence
  misc_feature: DNAzyme
tctttacaggctagctacaacgactggagca

SEQ ID NO: 8980 - DNA, 31 bp, artificial sequence
  misc_feature: DNAzyme
cctctttaggctagctacaacgaatctggag

SEQ ID NO: 8981 - DNA, 31 bp, artificial sequence
  misc_feature: DNAzyme
gggtggcaggctagctacaacgaccctcttt

SEQ ID NO: 8982 - DNA, 31 bp, artificial sequence
  misc_feature: DNAzyme
tagggtggggctagctacaacgaatccctct

SEQ ID NO: 8983 - DNA, 31 bp, artificial sequence
  misc_feature: DNAzyme
tagtagggggctagctacaacgaggcatccc

SEQ ID NO: 8984 - DNA, 31 bp, artificial sequence
  misc_feature: DNAzyme
accactagggctagctacaacgaagggtggc

SEQ ID NO: 8985 - DNA, 31 bp, artificial sequence
  misc_feature: DNAzyme
ccacaccaggctagctacaacgatagtaggg

SEQ ID NO: 8986 - DNA, 31 bp, artificial sequence
  misc_feature: DNAzyme
gggccacaggctagctacaacgacactagta

SEQ ID NO: 8987 - DNA, 31 bp, artificial sequence
  misc_feature: DNAzyme
cagggccaggctagctacaacgaaccactag

SEQ ID NO: 8988 - DNA, 31 bp, artificial sequence
  misc_feature: DNAzyme
gcgcagggggctagctacaacgacacaccac

SEQ ID NO: 8989 - DNA, 31 bp, artificial sequence
  misc_feature: DNAzyme
ggggggcgggctagctacaacgaagggccac

SEQ ID NO: 8990 - DNA, 31 bp, artificial sequence
  misc_feature: DNAzyme
agggggggggctagctacaacgagcagggcc

SEQ ID NO: 8991 - DNA, 31 bp, artificial sequence
  misc_feature: DNAzyme
ctacacgaggctagctacaacgaaggggggg

SEQ ID NO: 8992 - DNA, 31 bp, artificial sequence
  misc_feature: DNAzyme
cacctacaggctagctacaacgagacagggg

SEQ ID NO: 8993 - DNA, 31 bp, artificial sequence
  misc_feature: DNAzyme
gacacctaggctagctacaacgaacgacagg

SEQ ID NO: 8994 - DNA, 31 bp, artificial sequence
  misc_feature: DNAzyme
cggggacaggctagctacaacgactacacga

SEQ ID NO: 8995 - DNA, 31 bp, artificial sequence
  misc_feature: DNAzyme
gacggggaggctagctacaacgaacctacac

SEQ ID NO: 8996 - DNA, 31 bp, artificial sequence
  misc_feature: DNAzyme
ggcgttgaggctagctacaacgaggggacac

SEQ ID NO: 8997 - DNA, 31 bp, artificial sequence
  misc_feature: DNAzyme
tgccggcgggctagctacaacgatgacgggg

SEQ ID NO: 8998 - DNA, 31 bp, artificial sequence
  misc_feature: DNAzyme
tttgccggggctagctacaacgagttgacgg

SEQ ID NO: 8999 - DNA, 31 bp, artificial sequence
  misc_feature: DNAzyme
actctttgggctagctacaacgacggcgttg

SEQ ID NO: 9000 - DNA, 31 bp, artificial sequence
  misc_feature: DNAzyme
tgatgctaggctagctacaacgatctttgcc

SEQ ID NO: 9001 - DNA, 31 bp, artificial sequence
  misc_feature: DNAzyme
ttgtgatgggctagctacaacgatactcttt

SEQ ID NO: 9002 - DNA, 31 bp, artificial sequence
  misc_feature: DNAzyme
gattgtgaggctagctacaacgagctactct

SEQ ID NO: 9003 - DNA, 31 bp, artificial sequence
  misc_feature: DNAzyme
gttgattgggctagctacaacgagatgctac

SEQ ID NO: 9004 - DNA, 31 bp, artificial sequence
  misc_feature: DNAzyme
ggtgttgaggctagctacaacgatgtgatgc

SEQ ID NO: 9005 - DNA, 31 bp, artificial sequence
  misc_feature: DNAzyme
ctaaggtgggctagctacaacgatgattgtg

SEQ ID NO: 9006 - DNA, 31 bp, artificial sequence
  misc_feature: DNAzyme
ggctaaggggctagctacaacgagttgattg

SEQ ID NO: 9007 - DNA, 31 bp, artificial sequence
  misc_feature: DNAzyme
gaactgggggctagctacaacgataaggtgt

SEQ ID NO: 9008 - DNA, 31 bp, artificial sequence
  misc_feature: DNAzyme
gtggggaaggctagctacaacgatgggctaa

SEQ ID NO: 9009 - DNA, 31 bp, artificial sequence
  misc_feature: DNAzyme
ttccatggggctagctacaacgaggggaact

SEQ ID NO: 9010 - DNA, 31 bp, artificial sequence
  misc_feature: DNAzyme
ttattccaggctagctacaacgaggtgggga

SEQ ID NO: 9011 - DNA, 31 bp, artificial sequence
  misc_feature: DNAzyme
gcctattaggctagctacaacgatccatggt

SEQ ID NO: 9012 - DNA, 31 bp, artificial sequence
  misc_feature: DNAzyme
cttgcctaggctagctacaacgatattccat

SEQ ID NO: 9013 - DNA, 31 bp, artificial sequence
  misc_feature: DNAzyme
gggccttgggctagctacaacgactattatt

SEQ ID NO: 9014 - DNA, 31 bp, artificial sequence
  misc_feature: DNAzyme
ctggcgggggctagctacaacgacttgccta

SEQ ID NO: 9015 - DNA, 31 bp, artificial sequence
  misc_feature: DNAzyme
agtcctggggctagctacaacgagggccttg

SEQ ID NO: 9016 - DNA, 31 bp, artificial sequence
  misc_feature: DNAzyme
ctggggagggctagctacaacgacctggcgg

SEQ ID NO: 9017 - DNA, 31 bp, artificial sequence
  misc_feature: DNAzyme
ggggcccaggctagctacaacgatggggagt

SEQ ID NO: 9018 - DNA, 31 bp, artificial sequence
  misc_feature: DNAzyme
ggcgggggggctagctacaacgaccactggg

SEQ ID NO: 9019 - DNA, 31 bp, artificial sequence
  misc_feature: DNAzyme
catggtggggctagctacaacgagggggccc

SEQ ID NO: 9020 - DNA, 31 bp, artificial sequence
  misc_feature: DNAzyme
ggacatggggctagctacaacgaggcggggg

SEQ ID NO: 9021 - DNA, 31 bp, artificial sequence
  misc_feature: DNAzyme
cgtggacaggctagctacaacgaggtggcgg

SEQ ID NO: 9022 - DNA, 31 bp, artificial sequence
  misc_feature: DNAzyme
gtcgtggaggctagctacaacgaatggtggc

SEQ ID NO: 9023 - DNA, 31 bp, artificial sequence
  misc_feature: DNAzyme
agccgtcgggctagctacaacgaggacatgg

SEQ ID NO: 9024 - DNA, 31 bp, artificial sequence
  misc_feature: DNAzyme
acaagccgggctagctacaacgacgtggaca

SEQ ID NO: 9025 - DNA, 31 bp, artificial sequence
  misc_feature: DNAzyme
cccacaagggctagctacaacgacgtcgtgg

SEQ ID NO: 9026 - DNA, 31 bp, artificial sequence
  misc_feature: DNAzyme
ggatcccaggctagctacaacgaaagccgtc

SEQ ID NO: 9027 - DNA, 31 bp, artificial sequence
  misc_feature: DNAzyme
gctccggaggctagctacaacgacccacaag

SEQ ID NO: 9028 - DNA, 31 bp, artificial sequence
  misc_feature: DNAzyme
cgcagttgggctagctacaacgatccggatc

SEQ ID NO: 9029 - DNA, 31 bp, artificial sequence
  misc_feature: DNAzyme
tatcgcagggctagctacaacgatgctccgg

SEQ ID NO: 9030 - DNA, 31 bp, artificial sequence
  misc_feature: DNAzyme
tggtatcgggctagctacaacgaagttgctc

SEQ ID NO: 9031 - DNA, 31 bp, artificial sequence
  misc_feature: DNAzyme
tagtggtaggctagctacaacgacgcagttg

SEQ ID NO: 9032 - DNA, 31 bp, artificial sequence
  misc_feature: DNAzyme
cctagtggggctagctacaacgaatcgcagt

SEQ ID NO: 9033 - DNA, 31 bp, artificial sequence
  misc_feature: DNAzyme
agccctagggctagctacaacgaggtatcgc

SEQ ID NO: 9034 - DNA, 31 bp, artificial sequence
  misc_feature: DNAzyme
tacaacagggctagctacaacgacctagtgg

SEQ ID NO: 9035 - DNA, 31 bp, artificial sequence
  misc_feature: DNAzyme
acctacaaggctagctacaacgaagccctag

SEQ ID NO: 9036 - DNA, 31 bp, artificial sequence
  misc_feature: DNAzyme
gtcacctaggctagctacaacgaaacagccc

SEQ ID NO: 9037 - DNA, 31 bp, artificial sequence
  misc_feature: DNAzyme
attggtcaggctagctacaacgactacaaca

SEQ ID NO: 9038 - DNA, 31 bp, artificial sequence
  misc_feature: DNAzyme
tgaattggggctagctacaacgacacctaca

SEQ ID NO: 9039 - DNA, 31 bp, artificial sequence
  misc_feature: DNAzyme
atgatgaaggctagctacaacgatggtcacc

SEQ ID NO: 9040 - DNA, 31 bp, artificial sequence
  misc_feature: DNAzyme
tatgatgaggctagctacaacgagaattggt

SEQ ID NO: 9041 - DNA, 31 bp, artificial sequence
  misc_feature: DNAzyme
ggatatgaggctagctacaacgagatgaatt

SEQ ID NO: 9042 - DNA, 31 bp, artificial sequence
  misc_feature: DNAzyme
ttgggataggctagctacaacgagatgatga

SEQ ID NO: 9043 - DNA, 31 bp, artificial sequence
  misc_feature: DNAzyme
gcttgggaggctagctacaacgaatgatgat

SEQ ID NO: 9044 - DNA, 31 bp, artificial sequence
  misc_feature: DNAzyme
tcgcatggggctagctacaacgattgggata

SEQ ID NO: 9045 - DNA, 31 bp, artificial sequence
  misc_feature: DNAzyme
ccatcgcaggctagctacaacgaggcttggg

SEQ ID NO: 9046 - DNA, 31 bp, artificial sequence
  misc_feature: DNAzyme
ggccatcgggctagctacaacgaatggcttg

SEQ ID NO: 9047 - DNA, 31 bp, artificial sequence
  misc_feature: DNAzyme
tcaggccaggctagctacaacgacgcatggc

SEQ ID NO: 9048 - DNA, 31 bp, artificial sequence
  misc_feature: DNAzyme
gtatcaggggctagctacaacgacatcgcat

SEQ ID NO: 9049 - DNA, 31 bp, artificial sequence
  misc_feature: DNAzyme
gccacgtaggctagctacaacgacaggccat

SEQ ID NO: 9050 - DNA, 31 bp, artificial sequence
  misc_feature: DNAzyme
cggccacgggctagctacaacgaatcaggcc

SEQ ID NO: 9051 - DNA, 31 bp, artificial sequence
  misc_feature: DNAzyme
cccggccaggctagctacaacgagtatcagg

SEQ ID NO: 9052 - DNA, 31 bp, artificial sequence
  misc_feature: DNAzyme
tatcccggggctagctacaacgacacgtatc

SEQ ID NO: 9053 - DNA, 31 bp, artificial sequence
  misc_feature: DNAzyme
tcgatctaggctagctacaacgacccggcca

SEQ ID NO: 9054 - DNA, 31 bp, artificial sequence
  misc_feature: DNAzyme
ttgctcgaggctagctacaacgactatcccg

SEQ ID NO: 9055 - DNA, 31 bp, artificial sequence
  misc_feature: DNAzyme
tgtaattgggctagctacaacgatcgatcta

SEQ ID NO: 9056 - DNA, 31 bp, artificial sequence
  misc_feature: DNAzyme
gactgtaaggctagctacaacgatgctcgat

SEQ ID NO: 9057 - DNA, 31 bp, artificial sequence
  misc_feature: DNAzyme
caggactgggctagctacaacgaaattgctc

SEQ ID NO: 9058 - DNA, 31 bp, artificial sequence
  misc_feature: DNAzyme
gtacaggaggctagctacaacgatgtaattg

SEQ ID NO: 9059 - DNA, 31 bp, artificial sequence
  misc_feature: DNAzyme
agacagtaggctagctacaacgaaggactgt

SEQ ID NO: 9060 - DNA, 31 bp, artificial sequence
  misc_feature: DNAzyme
tgagacagggctagctacaacgaacaggact

SEQ ID NO: 9061 - DNA, 31 bp, artificial sequence
  misc_feature: DNAzyme
gtatgagaggctagctacaacgaagtacagg

SEQ ID NO: 9062 - DNA, 31 bp, artificial sequence
  misc_feature: DNAzyme
cgccggtaggctagctacaacgagagacagt

SEQ ID NO: 9063 - DNA, 31 bp, artificial sequence
  misc_feature: DNAzyme
ctcgccggggctagctacaacgaatgagaca

SEQ ID NO: 9064 - DNA, 31 bp, artificial sequence
  misc_feature: DNAzyme
tcgcctcgggctagctacaacgacggtatga

SEQ ID NO: 9065 - DNA, 31 bp, artificial sequence
  misc_feature: DNAzyme
ccttctcgggctagctacaacgactcgccgg

SEQ ID NO: 9066 - DNA, 31 bp, artificial sequence
  misc_feature: DNAzyme
gctgttcaggctagctacaacgacttctcgc

SEQ ID NO: 9067 - DNA, 31 bp, artificial sequence
  misc_feature: DNAzyme
ctcagctgggctagctacaacgatcaccttc

SEQ ID NO: 9068 - DNA, 31 bp, artificial sequence
  misc_feature: DNAzyme
tctctcagggctagctacaacgatgttcacc

SEQ ID NO: 9069 - DNA, 31 bp, artificial sequence
  misc_feature: DNAzyme
cttcctcgggctagctacaacgactctcagc

SEQ ID NO: 9070 - DNA, 31 bp, artificial sequence
  misc_feature: DNAzyme
cggatctgggctagctacaacgacttcctcg

SEQ ID NO: 9071 - DNA, 31 bp, artificial sequence
  misc_feature: DNAzyme
tctgcggaggctagctacaacgactgtcttc

SEQ ID NO: 9072 - DNA, 31 bp, artificial sequence
  misc_feature: DNAzyme
gatctctgggctagctacaacgaggatctgt

SEQ ID NO: 9073 - DNA, 31 bp, artificial sequence
  misc_feature: DNAzyme
gtgggggaggctagctacaacgactctgcgg

SEQ ID NO: 9074 - DNA, 31 bp, artificial sequence
  misc_feature: DNAzyme
tatgtacgggctagctacaacgagggggatc

SEQ ID NO: 9075 - DNA, 31 bp, artificial sequence
  misc_feature: DNAzyme
gctatgtaggctagctacaacgagtggggga

SEQ ID NO: 9076 - DNA, 31 bp, artificial sequence
  misc_feature: DNAzyme
ctgctatgggctagctacaacgaacgtgggg

SEQ ID NO: 9077 - DNA, 31 bp, artificial sequence
  misc_feature: DNAzyme
ctctgctaggctagctacaacgagtacgtgg

SEQ ID NO: 9078 - DNA, 31 bp, artificial sequence
  misc_feature: DNAzyme
ctgctctgggctagctacaacgatatgtacg

SEQ ID NO: 9079 - DNA, 31 bp, artificial sequence
  misc_feature: DNAzyme
gctttctgggctagctacaacgatctgctat

SEQ ID NO: 9080 - DNA, 31 bp, artificial sequence
  misc_feature: DNAzyme
ggcggctgggctagctacaacgatttctgct

SEQ ID NO: 9081 - DNA, 31 bp, artificial sequence
  misc_feature: DNAzyme
tggggcggggctagctacaacgatgctttct

SEQ ID NO: 9082 - DNA, 31 bp, artificial sequence
  misc_feature: DNAzyme
cgttggggggctagctacaacgaggctgctt

SEQ ID NO: 9083 - DNA, 31 bp, artificial sequence
  misc_feature: DNAzyme
tttgctcgggctagctacaacgatggggcgg

SEQ ID NO: 9084 - DNA, 31 bp, artificial sequence
  misc_feature: DNAzyme
tcgatttgggctagctacaacgatcgttggg

SEQ ID NO: 9085 - DNA, 31 bp, artificial sequence
  misc_feature: DNAzyme
cacgtcgaggctagctacaacgattgctcgt

SEQ ID NO: 9086 - DNA, 31 bp, artificial sequence
  misc_feature: DNAzyme
gcgtcacgggctagctacaacgacgatttgc

SEQ ID NO: 9087 - DNA, 31 bp, artificial sequence
  misc_feature: DNAzyme
cggcgtcaggctagctacaacgagtcgattt

SEQ ID NO: 9088 - DNA, 31 bp, artificial sequence
  misc_feature: DNAzyme
atacggcgggctagctacaacgacacgtcga

SEQ ID NO: 9089 - DNA, 31 bp, artificial sequence
  misc_feature: DNAzyme
cgatacggggctagctacaacgagtcacgtc

SEQ ID NO: 9090 - DNA, 31 bp, artificial sequence
  misc_feature: DNAzyme
cgacgataggctagctacaacgaggcgtcac

SEQ ID NO: 9091 - DNA, 31 bp, artificial sequence
  misc_feature: DNAzyme
tacgacgaggctagctacaacgaacggcgtc

SEQ ID NO: 9092 - DNA, 31 bp, artificial sequence
  misc_feature: DNAzyme
cactacgaggctagctacaacgagatacggc

SEQ ID NO: 9093 - DNA, 31 bp, artificial sequence
  misc_feature: DNAzyme
ccccactaggctagctacaacgagacgatac

SEQ ID NO: 9094 - DNA, 31 bp, artificial sequence
  misc_feature: DNAzyme
catccccaggctagctacaacgatacgacga

SEQ ID NO: 9095 - DNA, 31 bp, artificial sequence
  misc_feature: DNAzyme
tgccagcaggctagctacaacgaccccacta

SEQ ID NO: 9096 - DNA, 31 bp, artificial sequence
  misc_feature: DNAzyme
aatgccagggctagctacaacgaatccccac

SEQ ID NO: 9097 - DNA, 31 bp, artificial sequence
  misc_feature: DNAzyme
caggaatgggctagctacaacgacagcatcc

SEQ ID NO: 9098 - DNA, 31 bp, artificial sequence
  misc_feature: DNAzyme
gccaggaaggctagctacaacgagccagcat

SEQ ID NO: 9099 - DNA, 31 bp, artificial sequence
  misc_feature: DNAzyme
gctcgcggggctagctacaacgacaggaatg

SEQ ID NO: 9100 - DNA, 31 bp, artificial sequence
  misc_feature: DNAzyme
cacgctcgggctagctacaacgaggccagga

SEQ ID NO: 9101 - DNA, 31 bp, artificial sequence
  misc_feature: DNAzyme
ctcccacgggctagctacaacgatcgcggcc

SEQ ID NO: 9102 - DNA, 31 bp, artificial sequence
  misc_feature: DNAzyme
cactcccaggctagctacaacgagctcgcgg

SEQ ID NO: 9103 - DNA, 31 bp, artificial sequence
  misc_feature: DNAzyme
agcgctcaggctagctacaacgatcccacgc

SEQ ID NO: 9104 - DNA, 31 bp, artificial sequence
  misc_feature: DNAzyme
gggtagcgggctagctacaacgatcactccc

SEQ ID NO: 9105 - DNA, 31 bp, artificial sequence
  misc_feature: DNAzyme
ctgggtagggctagctacaacgagctcactc

SEQ ID NO: 9106 - DNA, 31 bp, artificial sequence
  misc_feature: DNAzyme
ctgctgggggctagctacaacgaagcgctca

SEQ ID NO: 9107 - DNA, 31 bp, artificial sequence
  misc_feature: DNAzyme
tcccgctgggctagctacaacgatgggtagc

SEQ ID NO: 9108 - DNA, 31 bp, artificial sequence
  misc_feature: DNAzyme
tcctcccgggctagctacaacgatgctgggt

SEQ ID NO: 9109 - DNA, 31 bp, artificial sequence
  misc_feature: DNAzyme
gagaacaaggctagctacaacgatcctcccg

SEQ ID NO: 9110 - DNA, 31 bp, artificial sequence
  misc_feature: DNAzyme
cgggagaaggctagctacaacgaaactcctc

SEQ ID NO: 9111 - DNA, 31 bp, artificial sequence
  misc_feature: DNAzyme
gccctgcgggctagctacaacgatcgggaga

SEQ ID NO: 9112 - DNA, 31 bp, artificial sequence
  misc_feature: DNAzyme
gtgccctgggctagctacaacgagttcggga

SEQ ID NO: 9113 - DNA, 31 bp, artificial sequence
  misc_feature: DNAzyme
ggtgcgtgggctagctacaacgacctgcgtt

SEQ ID NO: 9114 - DNA, 31 bp, artificial sequence
  misc_feature: DNAzyme
ggggtgcgggctagctacaacgagccctgcg

SEQ ID NO: 9115 - DNA, 31 bp, artificial sequence
  misc_feature: DNAzyme
ccggggtgggctagctacaacgagtgccctg

SEQ ID NO: 9116 - DNA, 31 bp, artificial sequence
  misc_feature: DNAzyme
ccccggggggctagctacaacgagcgtgccc

SEQ ID NO: 9117 - DNA, 31 bp, artificial sequence
  misc_feature: DNAzyme
catgcacaggctagctacaacgacccggggt

SEQ ID NO: 9118 - DNA, 31 bp, artificial sequence
  misc_feature: DNAzyme
atcatgcaggctagctacaacgaaccccggg

SEQ ID NO: 9119 - DNA, 31 bp, artificial sequence
  misc_feature: DNAzyme
tgatcatgggctagctacaacgaacaccccg

SEQ ID NO: 9120 - DNA, 31 bp, artificial sequence
  misc_feature: DNAzyme
catgatcaggctagctacaacgagcacaccc

SEQ ID NO: 9121 - DNA, 31 bp, artificial sequence
  misc_feature: DNAzyme
ggacatgaggctagctacaacgacatgcaca

SEQ ID NO: 9122 - DNA, 31 bp, artificial sequence
  misc_feature: DNAzyme
agaggacaggctagctacaacgagatcatgc

SEQ ID NO: 9123 - DNA, 31 bp, artificial sequence
  misc_feature: DNAzyme
gcagaggaggctagctacaacgaatgatcat

SEQ ID NO: 9124 - DNA, 31 bp, artificial sequence
  misc_feature: DNAzyme
gtatgaggggctagctacaacgaagaggaca

SEQ ID NO: 9125 - DNA, 31 bp, artificial sequence
  misc_feature: DNAzyme
attgtgtaggctagctacaacgagaggcaga

SEQ ID NO: 9126 - DNA, 31 bp, artificial sequence
  misc_feature: DNAzyme
gcattgtgggctagctacaacgaatgaggca

SEQ ID NO: 9127 - DNA, 31 bp, artificial sequence
  misc_feature: DNAzyme
aagcattgggctagctacaacgagtatgagg

SEQ ID NO: 9128 - DNA, 31 bp, artificial sequence
  misc_feature: DNAzyme
ctcaagcaggctagctacaacgatgtgtatg

SEQ ID NO: 9129 - DNA, 31 bp, artificial sequence
  misc_feature: DNAzyme
aactcaagggctagctacaacgaattgtgta

SEQ ID NO: 9130 - DNA, 31 bp, artificial sequence
  misc_feature: DNAzyme
tgctccaaggctagctacaacgatcaagcat

SEQ ID NO: 9131 - DNA, 31 bp, artificial sequence
  misc_feature: DNAzyme
aacgattgggctagctacaacgatccaactc

SEQ ID NO: 9132 - DNA, 31 bp, artificial sequence
  misc_feature: DNAzyme
acgaacgaggctagctacaacgatgctccaa

SEQ ID NO: 9133 - DNA, 31 bp, artificial sequence
  misc_feature: DNAzyme
gtcacgaaggctagctacaacgagattgctc

SEQ ID NO: 9134 - DNA, 31 bp, artificial sequence
  misc_feature: DNAzyme
ccatgtcaggctagctacaacgagaacgatt

SEQ ID NO: 9135 - DNA, 31 bp, artificial sequence
  misc_feature: DNAzyme
gtaccatgggctagctacaacgacacgaacg

SEQ ID NO: 9136 - DNA, 31 bp, artificial sequence
  misc_feature: DNAzyme
ctgtaccaggctagctacaacgagtcacgaa

SEQ ID NO: 9137 - DNA, 31 bp, artificial sequence
  misc_feature: DNAzyme
gggctgtaggctagctacaacgacatgtcac

SEQ ID NO: 9138 - DNA, 31 bp, artificial sequence
  misc_feature: DNAzyme
ccgggctgggctagctacaacgaaccatgtc

SEQ ID NO: 9139 - DNA, 31 bp, artificial sequence
  misc_feature: DNAzyme
cgtccgggggctagctacaacgatgtaccat

SEQ ID NO: 9140 - DNA, 31 bp, artificial sequence
  misc_feature: DNAzyme
gcaacgcgggctagctacaacgaccgggctg

SEQ ID NO: 9141 - DNA, 31 bp, artificial sequence
  misc_feature: DNAzyme
gtgcaacgggctagctacaacgagtccgggc

SEQ ID NO: 9142 - DNA, 31 bp, artificial sequence
  misc_feature: DNAzyme
gtgtgcaaggctagctacaacgagcgtccgg

SEQ ID NO: 9143 - DNA, 31 bp, artificial sequence
  misc_feature: DNAzyme
gaggtgtgggctagctacaacgaaacgcgtc

SEQ ID NO: 9144 - DNA, 31 bp, artificial sequence
  misc_feature: DNAzyme
atgaggtgggctagctacaacgagcaacgcg

SEQ ID NO: 9145 - DNA, 31 bp, artificial sequence
  misc_feature: DNAzyme
ttatgaggggctagctacaacgagtgcaacg

SEQ ID NO: 9146 - DNA, 31 bp, artificial sequence
  misc_feature: DNAzyme
tccgcttaggctagctacaacgagaggtgtg

SEQ ID NO: 9147 - DNA, 31 bp, artificial sequence
  misc_feature: DNAzyme
agcctccgggctagctacaacgattatgagg

SEQ ID NO: 9148 - DNA, 31 bp, artificial sequence
  misc_feature: DNAzyme
catcccagggctagctacaacgactccgctt

SEQ ID NO: 9149 - DNA, 31 bp, artificial sequence
  misc_feature: DNAzyme
tctgaccaggctagctacaacgacccagcct

SEQ ID NO: 9150 - DNA, 31 bp, artificial sequence
  misc_feature: DNAzyme
ctgtctgaggctagctacaacgacatcccag

SEQ ID NO: 9151 - DNA, 31 bp, artificial sequence
  misc_feature: DNAzyme
ctgccctgggctagctacaacgactgaccat

SEQ ID NO: 9152 - DNA, 31 bp, artificial sequence
  misc_feature: DNAzyme
ctctgctgggctagctacaacgacctgtctg

SEQ ID NO: 9153 - DNA, 31 bp, artificial sequence
  misc_feature: DNAzyme
tggctctgggctagctacaacgatgccctgt

SEQ ID NO: 9154 - DNA, 31 bp, artificial sequence
  misc_feature: DNAzyme
cctcttggggctagctacaacgatctgctgc

SEQ ID NO: 9155 - DNA, 31 bp, artificial sequence
  misc_feature: DNAzyme
tttctctaggctagctacaacgacttcctct

SEQ ID NO: 9156 - DNA, 31 bp, artificial sequence
  misc_feature: DNAzyme
cccggttgggctagctacaacgatctttctc

SEQ ID NO: 9157 - DNA, 31 bp, artificial sequence
  misc_feature: DNAzyme
ctgcccggggctagctacaacgatgctcttt

SEQ ID NO: 9158 - DNA, 31 bp, artificial sequence
  misc_feature: DNAzyme
ggaatctgggctagctacaacgaccggttgc

SEQ ID NO: 9159 - DNA, 31 bp, artificial sequence
  misc_feature: DNAzyme
acagggaaggctagctacaacgactgcccgg

SEQ ID NO: 9160 - DNA, 31 bp, artificial sequence
  misc_feature: DNAzyme
ctatgcaaggctagctacaacgaagggaatc

SEQ ID NO: 9161 - DNA, 31 bp, artificial sequence
  misc_feature: DNAzyme
gaactatgggctagctacaacgaaacaggga

SEQ ID NO: 9162 - DNA, 31 bp, artificial sequence
  misc_feature: DNAzyme
gtgaactaggctagctacaacgagcaacagg

SEQ ID NO: 9163 - DNA, 31 bp, artificial sequence
  misc_feature: DNAzyme
ggcgtgaaggctagctacaacgatatgcaac

SEQ ID NO: 9164 - DNA, 31 bp, artificial sequence
  misc_feature: DNAzyme
agacggcgggctagctacaacgagaactatg

SEQ ID NO: 9165 - DNA, 31 bp, artificial sequence
  misc_feature: DNAzyme
gaagacggggctagctacaacgagtgaacta

SEQ ID NO: 9166 - DNA, 31 bp, artificial sequence
  misc_feature: DNAzyme
ctggaagaggctagctacaacgaggcgtgaa

SEQ ID NO: 9167 - DNA, 31 bp, artificial sequence
  misc_feature: DNAzyme
cgtccgggggctagctacaacgatctggaag

SEQ ID NO: 9168 - DNA, 31 bp, artificial sequence
  misc_feature: DNAzyme
gcatggcgggctagctacaacgaccgggttc

SEQ ID NO: 9169 - DNA, 31 bp, artificial sequence
  misc_feature: DNAzyme
gcgcatggggctagctacaacgagtccgggt

SEQ ID NO: 9170 - DNA, 31 bp, artificial sequence
  misc_feature: DNAzyme
ctggcgcaggctagctacaacgaggcgtccg

SEQ ID NO: 9171 - DNA, 31 bp, artificial sequence
  misc_feature: DNAzyme
ccctggcgggctagctacaacgaatggcgtc

SEQ ID NO: 9172 - DNA, 31 bp, artificial sequence
  misc_feature: DNAzyme
ggccctggggctagctacaacgagcatggcg

SEQ ID NO: 9173 - DNA, 31 bp, artificial sequence
  misc_feature: DNAzyme
tgccagggggctagctacaacgacctggcgc

SEQ ID NO: 9174 - DNA, 31 bp, artificial sequence
  misc_feature: DNAzyme
aggcactgggctagctacaacgacagggccc

SEQ ID NO: 9175 - DNA, 31 bp, artificial sequence
  misc_feature: DNAzyme
gggaggcaggctagctacaacgatgccaggg

SEQ ID NO: 9176 - DNA, 31 bp, artificial sequence
  misc_feature: DNAzyme
ttgggaggggctagctacaacgaactgccag

SEQ ID NO: 9177 - DNA, 31 bp, artificial sequence
  misc_feature: DNAzyme
cgtcggcgggctagctacaacgaccccttgg

SEQ ID NO: 9178 - DNA, 31 bp, artificial sequence
  misc_feature: DNAzyme
ctcgtcggggctagctacaacgagccccctt

SEQ ID NO: 9179 - DNA, 31 bp, artificial sequence
  misc_feature: DNAzyme
tccgctcgggctagctacaacgacggcgccc

SEQ ID NO: 9180 - DNA, 31 bp, artificial sequence
  misc_feature: DNAzyme
acattccgggctagctacaacgatcgtcggc

SEQ ID NO: 9181 - DNA, 31 bp, artificial sequence
  misc_feature: DNAzyme
ggggtacaggctagctacaacgatccgctcg

SEQ ID NO: 9182 - DNA, 31 bp, artificial sequence
  misc_feature: DNAzyme
atggggtaggctagctacaacgaattccgct

SEQ ID NO: 9183 - DNA, 31 bp, artificial sequence
  misc_feature: DNAzyme
tcatggggggctagctacaacgaacattccg

SEQ ID NO: 9184 - DNA, 31 bp, artificial sequence
  misc_feature: DNAzyme
cgacctcaggctagctacaacgaggggtaca

SEQ ID NO: 9185 - DNA, 31 bp, artificial sequence
  misc_feature: DNAzyme
ttcgccgaggctagctacaacgactcatggg

SEQ ID NO: 9186 - DNA, 31 bp, artificial sequence
  misc_feature: DNAzyme
cggcttcgggctagctacaacgacgacctca

SEQ ID NO: 9187 - DNA, 31 bp, artificial sequence
  misc_feature: DNAzyme
acatgcggggctagctacaacgattcgccga

SEQ ID NO: 9188 - DNA, 31 bp, artificial sequence
  misc_feature: DNAzyme
ctcacatgggctagctacaacgaggcttcgc

SEQ ID NO: 9189 - DNA, 31 bp, artificial sequence
  misc_feature: DNAzyme
ccctcacaggctagctacaacgagcggcttc

SEQ ID NO: 9190 - DNA, 31 bp, artificial sequence
  misc_feature: DNAzyme
taccctcaggctagctacaacgaatgcggct

SEQ ID NO: 9191 - DNA, 31 bp, artificial sequence
  misc_feature: DNAzyme
catcgataggctagctacaacgacctcacat

SEQ ID NO: 9192 - DNA, 31 bp, artificial sequence
  misc_feature: DNAzyme
gtcatcgaggctagctacaacgaaccctcac

SEQ ID NO: 9193 - DNA, 31 bp, artificial sequence
  misc_feature: DNAzyme
taaggtcaggctagctacaacgacgataccc

SEQ ID NO: 9194 - DNA, 31 bp, artificial sequence
  misc_feature: DNAzyme
gggtaaggggctagctacaacgacatcgata

SEQ ID NO: 9195 - DNA, 31 bp, artificial sequence
  misc_feature: DNAzyme
aacttgggggctagctacaacgaaaggtcat

SEQ ID NO: 9196 - DNA, 31 bp, artificial sequence
  misc_feature: DNAzyme
tcgcgtaaggctagctacaacgattgggtaa

SEQ ID NO: 9197 - DNA, 31 bp, artificial sequence
  misc_feature: DNAzyme
aggtcgcgggctagctacaacgaaacttggg

SEQ ID NO: 9198 - DNA, 31 bp, artificial sequence
  misc_feature: DNAzyme
gtaggtcgggctagctacaacgagtaacttg

SEQ ID NO: 9199 - DNA, 31 bp, artificial sequence
  misc_feature: DNAzyme
ggcgtaggggctagctacaacgacgcgtaac

SEQ ID NO: 9200 - DNA, 31 bp, artificial sequence
  misc_feature: DNAzyme
ccccggcgggctagctacaacgaaggtcgcg

SEQ ID NO: 9201 - DNA, 31 bp, artificial sequence
  misc_feature: DNAzyme
acccccggggctagctacaacgagtaggtcg

SEQ ID NO: 9202 - DNA, 31 bp, artificial sequence
  misc_feature: DNAzyme
cccacggaggctagctacaacgaccccggcg

SEQ ID NO: 9203 - DNA, 31 bp, artificial sequence
  misc_feature: DNAzyme
gggccccaggctagctacaacgaggaccccc

SEQ ID NO: 9204 - DNA, 31 bp, artificial sequence
  misc_feature: DNAzyme
agttggggggctagctacaacgacccacgga

SEQ ID NO: 9205 - DNA, 31 bp, artificial sequence
  misc_feature: DNAzyme
cggcctagggctagctacaacgatggggccc

SEQ ID NO: 9206 - DNA, 31 bp, artificial sequence
  misc_feature: DNAzyme
gctcccggggctagctacaacgactagttgg

SEQ ID NO: 9207 - DNA, 31 bp, artificial sequence
  misc_feature: DNAzyme
ccccgcggggctagctacaacgatcccggcc

SEQ ID NO: 9208 - DNA, 31 bp, artificial sequence
  misc_feature: DNAzyme
tcaccccgggctagctacaacgaggctcccg

SEQ ID NO: 9209 - DNA, 31 bp, artificial sequence
  misc_feature: DNAzyme
tcctgtcaggctagctacaacgacccgcggc

SEQ ID NO: 9210 - DNA, 31 bp, artificial sequence
  misc_feature: DNAzyme
ggctcctgggctagctacaacgacaccccgc

SEQ ID NO: 9211 - DNA, 31 bp, artificial sequence
  misc_feature: DNAzyme
caggatggggctagctacaacgatcctgtca

SEQ ID NO: 9212 - DNA, 31 bp, artificial sequence
  misc_feature: DNAzyme
gggcaggaggctagctacaacgaggctcctg

SEQ ID NO: 9213 - DNA, 31 bp, artificial sequence
  misc_feature: DNAzyme
agggtgggggctagctacaacgaaggatggc

SEQ ID NO: 9214 - DNA, 31 bp, artificial sequence
  misc_feature: DNAzyme
gcttagggggctagctacaacgagggcagga

SEQ ID NO: 9215 - DNA, 31 bp, artificial sequence
  misc_feature: DNAzyme
aatgagggggctagctacaacgattagggtg

SEQ ID NO: 9216 - DNA, 31 bp, artificial sequence
  misc_feature: DNAzyme
tatggcaaggctagctacaacgagagggctt

SEQ ID NO: 9217 - DNA, 31 bp, artificial sequence
  misc_feature: DNAzyme
ctctatggggctagctacaacgaaatgaggg

SEQ ID NO: 9218 - DNA, 31 bp, artificial sequence
  misc_feature: DNAzyme
cccctctaggctagctacaacgaggcaatga

SEQ ID NO: 9219 - DNA, 31 bp, artificial sequence
  misc_feature: DNAzyme
acccttggggctagctacaacgaccctctat

SEQ ID NO: 9220 - DNA, 31 bp, artificial sequence
  misc_feature: DNAzyme
cccgggtaggctagctacaacgaccttggcc

SEQ ID NO: 9221 - DNA, 31 bp, artificial sequence
  misc_feature: DNAzyme
agcccgggggctagctacaacgaacccttgg

SEQ ID NO: 9222 - DNA, 31 bp, artificial sequence
  misc_feature: DNAzyme
gggctcagggctagctacaacgaccgggtac

SEQ ID NO: 9223 - DNA, 31 bp, artificial sequence
  misc_feature: DNAzyme
ggcctgggggctagctacaacgatcagcccg

SEQ ID NO: 9224 - DNA, 31 bp, artificial sequence
  misc_feature: DNAzyme
gggcagggggctagctacaacgactgggctc

SEQ ID NO: 9225 - DNA, 31 bp, artificial sequence
  misc_feature: DNAzyme
cccgagggggctagctacaacgaagggcctg

SEQ ID NO: 9226 - DNA, 31 bp, artificial sequence
  misc_feature: DNAzyme
ctcgccggggctagctacaacgaccgagggc

SEQ ID NO: 9227 - DNA, 31 bp, artificial sequence
  misc_feature: DNAzyme
aaggctcgggctagctacaacgacggcccga

SEQ ID NO: 9228 - DNA, 31 bp, artificial sequence
  misc_feature: DNAzyme
ccccaaggggctagctacaacgatcgccggc

SEQ ID NO: 9229 - DNA, 31 bp, artificial sequence
  misc_feature: DNAzyme
acaacctaggctagctacaacgaccccaagg

SEQ ID NO: 9230 - DNA, 31 bp, artificial sequence
  misc_feature: DNAzyme
ggcgacaaggctagctacaacgactatcccc

SEQ ID NO: 9231 - DNA, 31 bp, artificial sequence
  misc_feature: DNAzyme
gaaggcgaggctagctacaacgaaacctatc

SEQ ID NO: 9232 - DNA, 31 bp, artificial sequence
  misc_feature: DNAzyme
gtggaaggggctagctacaacgagacaacct

SEQ ID NO: 9233 - DNA, 31 bp, artificial sequence
  misc_feature: DNAzyme
caacctcgggctagctacaacgaggaaggcg

SEQ ID NO: 9234 - DNA, 31 bp, artificial sequence
  misc_feature: DNAzyme
ggtcgcaaggctagctacaacgactcgtgga

SEQ ID NO: 9235 - DNA, 31 bp, artificial sequence
  misc_feature: DNAzyme
agcggtcgggctagctacaacgaaacctcgt

SEQ ID NO: 9236 - DNA, 31 bp, artificial sequence
  misc_feature: DNAzyme
ccgagcggggctagctacaacgacgcaacct

SEQ ID NO: 9237 - DNA, 31 bp, artificial sequence
  misc_feature: DNAzyme
cttccgagggctagctacaacgaggtcgcaa

SEQ ID NO: 9238 - DNA, 31 bp, artificial sequence
  misc_feature: DNAzyme
taggaagaggctagctacaacgattccgagc

SEQ ID NO: 9239 - DNA, 31 bp, artificial sequence
  misc_feature: DNAzyme
gcgcgcgaggctagctacaacgataggaaga

SEQ ID NO: 9240 - DNA, 31 bp, artificial sequence
  misc_feature: DNAzyme
tgtgcgcgggctagctacaacgagactagga

SEQ ID NO: 9241 - DNA, 31 bp, artificial sequence
  misc_feature: DNAzyme
ggtgtgcgggctagctacaacgagcgactag

SEQ ID NO: 9242 - DNA, 31 bp, artificial sequence
  misc_feature: DNAzyme
tgggtgtgggctagctacaacgagcgcgact

SEQ ID NO: 9243 - DNA, 31 bp, artificial sequence
  misc_feature: DNAzyme
gttgggtgggctagctacaacgagcgcgcga

SEQ ID NO: 9244 - DNA, 31 bp, artificial sequence
  misc_feature: DNAzyme
aggttgggggctagctacaacgagtgcgcgc

SEQ ID NO: 9245 - DNA, 31 bp, artificial sequence
  misc_feature: DNAzyme
gccccaggggctagctacaacgatgggtgtg

SEQ ID NO: 9246 - DNA, 31 bp, artificial sequence
  misc_feature: DNAzyme
cgcaggggggctagctacaacgacccaggtt

SEQ ID NO: 9247 - DNA, 31 bp, artificial sequence
  misc_feature: DNAzyme
ttgccgcgggctagctacaacgaaggggccc

SEQ ID NO: 9248 - DNA, 31 bp, artificial sequence
  misc_feature: DNAzyme
tgttgccgggctagctacaacgagcaggggc

SEQ ID NO: 9249 - DNA, 31 bp, artificial sequence
  misc_feature: DNAzyme
acctgttgggctagctacaacgacgcgcagg

SEQ ID NO: 9250 - DNA, 31 bp, artificial sequence
  misc_feature: DNAzyme
tttacctgggctagctacaacgatgccgcgc

SEQ ID NO: 9251 - DNA, 31 bp, artificial sequence
  misc_feature: DNAzyme
ggagtttaggctagctacaacgactgttgcc

SEQ ID NO: 9252 - DNA, 31 bp, artificial sequence
  misc_feature: DNAzyme
tggtggagggctagctacaacgattacctgt

SEQ ID NO: 9253 - DNA, 31 bp, artificial sequence
  misc_feature: DNAzyme
atcgttggggctagctacaacgaggagttta

SEQ ID NO: 9254 - DNA, 31 bp, artificial sequence
  misc_feature: DNAzyme
tcagatcgggctagctacaacgatggtggag

SEQ ID NO: 9255 - DNA, 31 bp, artificial sequence
  misc_feature: DNAzyme
tggtcagaggctagctacaacgacgttggtg

SEQ ID NO: 9256 - DNA, 31 bp, artificial sequence
  misc_feature: DNAzyme
ggcggtggggctagctacaacgacagatcgt

SEQ ID NO: 9257 - DNA, 31 bp, artificial sequence
  misc_feature: DNAzyme
ccgggcggggctagctacaacgaggtcagat

SEQ ID NO: 9258 - DNA, 31 bp, artificial sequence
  misc_feature: DNAzyme
ttcccgggggctagctacaacgaggtggtca

SEQ ID NO: 9259 - DNA, 31 bp, artificial sequence
  misc_feature: DNAzyme
acgtcaagggctagctacaacgatcccgggc

SEQ ID NO: 9260 - DNA, 31 bp, artificial sequence
  misc_feature: DNAzyme
acaggacgggctagctacaacgacaagttcc

SEQ ID NO: 9261 - DNA, 31 bp, artificial sequence
  misc_feature: DNAzyme
ccacaggaggctagctacaacgagtcaagtt

SEQ ID NO: 9262 - DNA, 31 bp, artificial sequence
  misc_feature: DNAzyme
gccgcccaggctagctacaacgaaggacgtc

SEQ ID NO: 9263 - DNA, 31 bp, artificial sequence
  misc_feature: DNAzyme
aaccgccgggctagctacaacgaccacagga

SEQ ID NO: 9264 - DNA, 31 bp, artificial sequence
  misc_feature: DNAzyme
accaaccgggctagctacaacgacgcccaca

SEQ ID NO: 9265 - DNA, 31 bp, artificial sequence
  misc_feature: DNAzyme
aacaccaaggctagctacaacgacgccgccc

SEQ ID NO: 9266 - DNA, 31 bp, artificial sequence
  misc_feature: DNAzyme
acgtaacaggctagctacaacgacaaccgcc

SEQ ID NO: 9267 - DNA, 31 bp, artificial sequence
  misc_feature: DNAzyme
aaacgtaaggctagctacaacgaaccaaccg

SEQ ID NO: 9268 - DNA, 31 bp, artificial sequence
  misc_feature: DNAzyme
accaaacgggctagctacaacgaaacaccaa

SEQ ID NO: 9269 - DNA, 31 bp, artificial sequence
  misc_feature: DNAzyme
aaaccaaaggctagctacaacgagtaacacc

SEQ ID NO: 9270 - DNA, 31 bp, artificial sequence
  misc_feature: DNAzyme
aagaaaaaggctagctacaacgacaaacgta

SEQ ID NO: 9271 - DNA, 31 bp, artificial sequence
  misc_feature: DNAzyme
atcctaaaggctagctacaacgactcaaaga

SEQ ID NO: 9272 - DNA, 31 bp, artificial sequence
  misc_feature: DNAzyme
agcacgaaggctagctacaacgacctaaacc

SEQ ID NO: 9273 - DNA, 31 bp, artificial sequence
  misc_feature: DNAzyme
catgagcaggctagctacaacgagaatccta

SEQ ID NO: 9274 - DNA, 31 bp, artificial sequence
  misc_feature: DNAzyme
accatgagggctagctacaacgaacgaatcc

SEQ ID NO: 9275 - DNA, 31 bp, artificial sequence
  misc_feature: DNAzyme
gtgcaccaggctagctacaacgagagcacga

SEQ ID NO: 9276 - DNA, 31 bp, artificial sequence
  misc_feature: DNAzyme
accgtgcaggctagctacaacgacatgagca

SEQ ID NO: 9277 - DNA, 31 bp, artificial sequence
  misc_feature: DNAzyme
agaccgtgggctagctacaacgaaccatgag

SEQ ID NO: 9278 - DNA, 31 bp, artificial sequence
  misc_feature: DNAzyme
gtagaccgggctagctacaacgagcaccatg

SEQ ID NO: 9279 - DNA, 31 bp, artificial sequence
  misc_feature: DNAzyme
ctcgtagaggctagctacaacgacgtgcacc

SEQ ID NO: 9280 - DNA, 31 bp, artificial sequence
  misc_feature: DNAzyme
aggtctcgggctagctacaacgaagaccgtg

SEQ ID NO: 9281 - DNA, 31 bp, artificial sequence
  misc_feature: DNAzyme
ccgggaggggctagctacaacgactcgtaga

SEQ ID NO: 9282 - DNA, 31 bp, artificial sequence
  misc_feature: DNAzyme
tgcgagtgggctagctacaacgacccgggag

SEQ ID NO: 9283 - DNA, 31 bp, artificial sequence
  misc_feature: DNAzyme
cttgcgagggctagctacaacgagccccggg

SEQ ID NO: 9284 - DNA, 31 bp, artificial sequence
  misc_feature: DNAzyme
ggtgcttgggctagctacaacgagagtgccc

SEQ ID NO: 9285 - DNA, 31 bp, artificial sequence
  misc_feature: DNAzyme
atagggtgggctagctacaacgattgcgagt

SEQ ID NO: 9286 - DNA, 31 bp, artificial sequence
  misc_feature: DNAzyme
tgatagggggctagctacaacgagcttgcga

SEQ ID NO: 9287 - DNA, 31 bp, artificial sequence
  misc_feature: DNAzyme
ctgcctgaggctagctacaacgaagggtgct

SEQ ID NO: 9288 - DNA, 31 bp, artificial sequence
  misc_feature: DNAzyme
tggtactgggctagctacaacgactgatagg

SEQ ID NO: 9289 - DNA, 31 bp, artificial sequence
  misc_feature: DNAzyme
ttgtggtaggctagctacaacgatgcctgat

SEQ ID NO: 9290 - DNA, 31 bp, artificial sequence
  misc_feature: DNAzyme
ccttgtggggctagctacaacgaactgcctg

SEQ ID NO: 9291 - DNA, 31 bp, artificial sequence
  misc_feature: DNAzyme
aggccttgggctagctacaacgaggtactgc

SEQ ID NO: 9292 - DNA, 31 bp, artificial sequence
  misc_feature: DNAzyme
gcgaaaggggctagctacaacgacttgtggt

SEQ ID NO: 9293 - DNA, 31 bp, artificial sequence
  misc_feature: DNAzyme
ttgggtcgggctagctacaacgagaaaggcc

SEQ ID NO: 9294 - DNA, 31 bp, artificial sequence
  misc_feature: DNAzyme
gtgttgggggctagctacaacgacgcgaaag

SEQ ID NO: 9295 - DNA, 31 bp, artificial sequence
  misc_feature: DNAzyme
gagtagtgggctagctacaacgatgggtcgc

SEQ ID NO: 9296 - DNA, 31 bp, artificial sequence
  misc_feature: DNAzyme
ccgagtagggctagctacaacgagttgggtc

SEQ ID NO: 9297 - DNA, 31 bp, artificial sequence
  misc_feature: DNAzyme
tagccgagggctagctacaacgaagtgttgg

SEQ ID NO: 9298 - DNA, 31 bp, artificial sequence
  misc_feature: DNAzyme
actgctagggctagctacaacgacgagtagt

SEQ ID NO: 9299 - DNA, 31 bp, artificial sequence
  misc_feature: DNAzyme
cgagactgggctagctacaacgatagccgag

SEQ ID NO: 9300 - DNA, 31 bp, artificial sequence
  misc_feature: DNAzyme
ccgcgagaggctagctacaacgatgctagcc

SEQ ID NO: 9301 - DNA, 31 bp, artificial sequence
  misc_feature: DNAzyme
tgcccccgggctagctacaacgagagactgc

SEQ ID NO: 9302 - DNA, 31 bp, artificial sequence
  misc_feature: DNAzyme
tgggcgtgggctagctacaacgaccccgcga

SEQ ID NO: 9303 - DNA, 31 bp, artificial sequence
  misc_feature: DNAzyme
tttgggcgggctagctacaacgagcccccgc

SEQ ID NO: 9304 - DNA, 31 bp, artificial sequence
  misc_feature: DNAzyme
gatttgggggctagctacaacgagtgccccc

SEQ ID NO: 9305 - DNA, 31 bp, artificial sequence
  misc_feature: DNAzyme
cctggagaggctagctacaacgattgggcgt

SEQ ID NO: 9306 - DNA, 31 bp, artificial sequence
  misc_feature: DNAzyme
gctcaatgggctagctacaacgactggagat

SEQ ID NO: 9307 - DNA, 31 bp, artificial sequence
  misc_feature: DNAzyme
ccgctcaaggctagctacaacgagcctggag

SEQ ID NO: 9308 - DNA, 31 bp, artificial sequence
  misc_feature: DNAzyme
tcaacccgggctagctacaacgatcaatgcc

SEQ ID NO: 9309 - DNA, 31 bp, artificial sequence
  misc_feature: DNAzyme
tggatcaaggctagctacaacgaccgctcaa

SEQ ID NO: 9310 - DNA, 31 bp, artificial sequence
  misc_feature: DNAzyme
ttcttggaggctagctacaacgacaacccgc

SEQ ID NO: 9311 - DNA, 31 bp, artificial sequence
  misc_feature: DNAzyme
cgaccgggggctagctacaacgacctttctt

SEQ ID NO: 9312 - DNA, 31 bp, artificial sequence
  misc_feature: DNAzyme
caggacgaggctagctacaacgacgggtcct

SEQ ID NO: 9313 - DNA, 31 bp, artificial sequence
  misc_feature: DNAzyme
tgccaggaggctagctacaacgagaccgggt

SEQ ID NO: 9314 - DNA, 31 bp, artificial sequence
  misc_feature: DNAzyme
cggaattgggctagctacaacgacaggacga

SEQ ID NO: 9315 - DNA, 31 bp, artificial sequence
  misc_feature: DNAzyme
caccggaaggctagctacaacgatgccagga

SEQ ID NO: 9316 - DNA, 31 bp, artificial sequence
  misc_feature: DNAzyme
tgagtacaggctagctacaacgacggaattg

SEQ ID NO: 9317 - DNA, 31 bp, artificial sequence
  misc_feature: DNAzyme
ggtgagtaggctagctacaacgaaccggaat

SEQ ID NO: 9318 - DNA, 31 bp, artificial sequence
  misc_feature: DNAzyme
ccggtgagggctagctacaacgaacaccgga

SEQ ID NO: 9319 - DNA, 31 bp, artificial sequence
  misc_feature: DNAzyme
ggaaccggggctagctacaacgagagtacac

SEQ ID NO: 9320 - DNA, 31 bp, artificial sequence
  misc_feature: DNAzyme
ctgcggaaggctagctacaacgacggtgagt

SEQ ID NO: 9321 - DNA, 31 bp, artificial sequence
  misc_feature: DNAzyme
gtggtctgggctagctacaacgaggaaccgg

SEQ ID NO: 9322 - DNA, 31 bp, artificial sequence
  misc_feature: DNAzyme
catagtggggctagctacaacgactgcggaa

SEQ ID NO: 9323 - DNA, 31 bp, artificial sequence
  misc_feature: DNAzyme
agccatagggctagctacaacgaggtctgcg

SEQ ID NO: 9324 - DNA, 31 bp, artificial sequence
  misc_feature: DNAzyme
gagagccaggctagctacaacgaagtggtct

SEQ ID NO: 9325 - DNA, 31 bp, artificial sequence
  misc_feature: DNAzyme
cgggagagggctagctacaacgacatagtgg

SEQ ID NO: 9326 - DNA, 31 bp, artificial sequence
  misc_feature: DNAzyme
ctccaggaggctagctacaacgacccccctc

SEQ ID NO: 9327 - DNA, 31 bp, artificial sequence
  misc_feature: DNAzyme
tcgtgcagggctagctacaacgactccagga

SEQ ID NO: 9328 - DNA, 31 bp, artificial sequence
  misc_feature: DNAzyme
gtgtcgtgggctagctacaacgaagcctcca

SEQ ID NO: 9329 - DNA, 31 bp, artificial sequence
  misc_feature: DNAzyme
gagtgtcgggctagctacaacgagcagcctc

SEQ ID NO: 9330 - DNA, 31 bp, artificial sequence
  misc_feature: DNAzyme
tatgagtgggctagctacaacgacgtgcagc

SEQ ID NO: 9331 - DNA, 31 bp, artificial sequence
  misc_feature: DNAzyme
agtatgagggctagctacaacgagtcgtgca

SEQ ID NO: 9332 - DNA, 31 bp, artificial sequence
  misc_feature: DNAzyme
cgttagtaggctagctacaacgagagtgtcg

SEQ ID NO: 9333 - DNA, 31 bp, artificial sequence
  misc_feature: DNAzyme
ggcgttagggctagctacaacgaatgagtgt

SEQ ID NO: 9334 - DNA, 31 bp, artificial sequence
  misc_feature: DNAzyme
ccatggcgggctagctacaacgatagtatga

SEQ ID NO: 9335 - DNA, 31 bp, artificial sequence
  misc_feature: DNAzyme
agccatggggctagctacaacgagttagtat

SEQ ID NO: 9336 - DNA, 31 bp, artificial sequence
  misc_feature: DNAzyme
tctagccaggctagctacaacgaggcgttag

SEQ ID NO: 9337 - DNA, 31 bp, artificial sequence
  misc_feature: DNAzyme
gcgtctagggctagctacaacgacatggcgt

SEQ ID NO: 9338 - DNA, 31 bp, artificial sequence
  misc_feature: DNAzyme
agaaagcgggctagctacaacgactagccat

SEQ ID NO: 9339 - DNA, 31 bp, artificial sequence
  misc_feature: DNAzyme
gcagaaagggctagctacaacgagtctagcc

SEQ ID NO: 9340 - DNA, 31 bp, artificial sequence
  misc_feature: DNAzyme
tcttcacgggctagctacaacgaagaaagcg

SEQ ID NO: 9341 - DNA, 31 bp, artificial sequence
  misc_feature: DNAzyme
tgtcttcaggctagctacaacgagcagaaag

SEQ ID NO: 9342 - DNA, 31 bp, artificial sequence
  misc_feature: DNAzyme
aactactgggctagctacaacgacttcacgc

SEQ ID NO: 9343 - DNA, 31 bp, artificial sequence
  misc_feature: DNAzyme
aggaactaggctagctacaacgatgtcttca

SEQ ID NO: 9344 - DNA, 31 bp, artificial sequence
  misc_feature: DNAzyme
gtgaggaaggctagctacaacgatactgtct

SEQ ID NO: 9345 - DNA, 31 bp, artificial sequence
  misc_feature: DNAzyme
ctcccctgggctagctacaacgagaggaact

SEQ ID NO: 9346 - DNA, 31 bp, artificial sequence
  misc_feature: DNAzyme
atagatcaggctagctacaacgatcccctgt

SEQ ID NO: 9347 - DNA, 31 bp, artificial sequence
  misc_feature: DNAzyme
accatagaggctagctacaacgacactcccc

SEQ ID NO: 9348 - DNA, 31 bp, artificial sequence
  misc_feature: DNAzyme
ctccaccaggctagctacaacgaagatcact

SEQ ID NO: 9349 - DNA, 31 bp, artificial sequence
  misc_feature: DNAzyme
acactccaggctagctacaacgacatagatc

SEQ ID NO: 9350 - DNA, 31 bp, artificial sequence
  misc_feature: DNAzyme
gggcgacaggctagctacaacgatccaccat

SEQ ID NO: 9351 - DNA, 31 bp, artificial sequence
  misc_feature: DNAzyme
gggggcgaggctagctacaacgaactccacc

SEQ ID NO: 9352 - RNA, 33 nt, Artificial Sequence
  misc_feature (1)..(4): phosphorothioate linkage
  misc_feature (8)..(8): 2'-deoxy-2'-C-allyl derivative
  misc_feature (28)..(32): 2'-Omethyl derivative
  misc_feature (25)..(26): 2'-Omethyl derivative
  misc_feature (13)..(23): 2'-Omethyl derivative
  misc_feature (11)..(11): 2'-Omethyl derivative
  misc_feature (33)..(33): n is an inverted deoxyabasic moiety
  misc_feature (1)..(7): 2'-Omethyl derivative
ccaagacugaugaggcgaaagccgaaaggaccn

SEQ ID NO: 9353 - DNA, 20 bp, Artificial Sequence
  misc_feature (1)..(19): phosphorothioate linkage
gtgctcatgatgcacggtct

SEQ ID NO: 9354 - RNA, 33 nt, Artificial Sequence
  misc_feature (1)..(4): phosphorothioate linkage
  misc_feature (26)..(26): n is a 5-bromo-2'-deoxy uridine
  misc_feature (8)..(8): 2'-deoxy-2'-C-allyl derivative
  misc_feature (25)..(25): 2'-Omethyl derivative
  misc_feature (28)..(32): 2'-Omethyl derivative
  misc_feature (13)..(23): 2'-Omethyl derivative
  misc_feature (1)..(7): 2'-Omethyl derivative
  misc_feature (11)..(11): 2'-Omethyl derivative
  misc_feature (33)..(33): n is an inverted deoxyabasic moiety
ccaagacugaugaggcguuagccganaggaccn

SEQ ID NO: 9355 - RNA, 33 nt, Artificial Sequence
  misc_feature (1)..(4): phosphorothioate linkage
  misc_feature (31)..(31): n is a 5-bromo-2'-deoxy uridine
  misc_feature (8)..(8): 2'-deoxy-2'-C-allyl derivative
  misc_feature (11)..(11): 2'-Omethyl derivative
  misc_feature (25)..(25): 2'-Omethyl derivative
  misc_feature (32)..(32): 2'-Omethyl derivative
  misc_feature (28)..(30): 2'-Omethyl derivative
  misc_feature (13)..(23): 2'-Omethyl derivative
  misc_feature (1)..(7): 2'-Omethyl derivative
  misc_feature (33)..(33): n is an inverted deoxyabasic moiety
ccaagacugaugaggcguuagccgaaaggancn

SEQ ID NO: 9356 - RNA, 33 nt, Artificial Sequence
  misc_feature (1)..(4): phosphorothioate linkage
  misc_feature (1)..(1): n is a 5-bromo-2'-deoxy uridine
  misc_feature (8)..(8): 2'-deoxy-2'-C-allyl derivative
  misc_feature (2)..(7): 2'-Omethyl derivative
  misc_feature (13)..(23): 2'-Omethyl derivative
  misc_feature (28)..(32): 2'-Omethyl derivative
  misc_feature (25)..(26): 2'-Omethyl derivative
  misc_feature (11)..(11): 2'-Omethyl derivative
  misc_feature (33)..(33): n is an inverted deoxyabasic moiety
ncaagacugaugaggcguuagccgaaaggaccn

SEQ ID NO: 9357 - RNA, 33 nt, Artificial Sequence; identical to SEQ ID NO: 9356
  misc_feature (2)..(4): phosphorothioate linkage
  misc_feature (1)..(1): n is a 5-bromo-2'-deoxy uridine
  misc_feature (8)..(8): 2'-deoxy-2'-C-allyl derivative
  misc_feature (2)..(7): 2'-Omethyl derivative
  misc_feature (25)..(26): 2'-Omethyl derivative
  misc_feature (28)..(32): 2'-Omethyl derivative
  misc_feature (13)..(23): 2'-Omethyl derivative
  misc_feature (11)..(11): 2'-Omethyl derivative
  misc_feature (33)..(33): n is an inverted deoxyabasic moiety

SEQ ID NO: 9358 - RNA, 33 nt, Artificial Sequence
  misc_feature (2)..(4): phosphorothioate linkage
  misc_feature (8)..(8): 2'-deoxy-2'-C-allyl derivative
  misc_feature (1)..(7): 2'-Omethyl derivative
  misc_feature (25)..(26): 2'-Omethyl derivative
  misc_feature (28)..(32): 2'-Omethyl derivative
  misc_feature (13)..(23): 2'-Omethyl derivative
  misc_feature (11)..(11): 2'-Omethyl derivative
  misc_feature (33)..(33): n is an inverted deoxyabasic moiety
ccaagacugaugaggcguuagccgaaaggaccn

SEQ ID NO: 9359 - RNA, 37 nt, Artificial Sequence
  misc_feature (1)..(4): phosphorothioate linkage
  misc_feature (17)..(17): 2'-deoxy-2'-amino derivative
  misc_feature (28)..(28): 2'-deoxy-2'-amino derivative
  misc_feature (29)..(36): 2'-Omethyl derivative
  misc_feature (1)..(7): 2'-Omethyl derivative
  misc_feature (9)..(15): 2'-Omethyl derivative
  misc_feature (21)..(24): 2'-Omethyl derivative
  misc_feature (27)..(27): 2'-Omethyl derivative
  misc_feature (19)..(19): 2'-Omethyl derivative
  misc_feature (37)..(37): n is an inverted deoxyabasic moiety
gccaugggccgaaaggcgagucaaggucuuagacgcn

SEQ ID NO: 9360 - RNA, 37 nt, Artificial Sequence
  misc_feature (1)..(4): phosphorothioate linkage
  misc_feature (17)..(17): 2'-deoxy-2'-amino derivative
  misc_feature (28)..(28): 2'-deoxy-2'-amino derivative
  misc_feature (9)..(15): 2'-Omethyl derivative
  misc_feature (1)..(7): 2'-Omethyl derivative
  misc_feature (29)..(36): 2'-Omethyl derivative
  misc_feature (27)..(27): 2'-Omethyl derivative
  misc_feature (21)..(24): 2'-Omethyl derivative
  misc_feature (19)..(19): 2'-Omethyl derivative
  misc_feature (37)..(37): n is an inverted deoxyabasic moiety
cacgacagccgaaaggcgagucaaggucuucauacun

SEQ ID NO: 9361 - RNA, 37 nt, Artificial Sequence
  misc_feature (1)..(4): phosphorothioate linkage
  misc_feature (17)..(17): 2'-deoxy-2'-amino derivative
  misc_feature (28)..(28): 2'-deoxy-2'-amino derivative
  misc_feature (29)..(36): 2'-Omethyl derivative
  misc_feature (27)..(27): phosphorothioate linkage
  misc_feature (9)..(15): 2'-Omethyl derivative
  misc_feature (21)..(24): 2'-Omethyl derivative
  misc_feature (19)..(19): 2'-Omethyl derivative
  misc_feature (1)..(7): 2'-Omethyl derivative
  misc_feature (37)..(37): n is an inverted deoxyabasic moiety
ugcacgagccgaaaggcgagucaaggucuacucauan

SEQ ID NO: 9362 - RNA, 37 nt, Artificial Sequence
  misc_feature (1)..(4): phosphorothioate linkage
  misc_feature (27)..(27): 2'-Omethyl derivative
  misc_feature (17)..(17): 2'-deoxy-2'-amino derivative
  misc_feature (28)..(28): 2'-deoxy-2'-amino derivative
  misc_feature (19)..(19): phosphorothioate linkage
  misc_feature (1)..(7): 2'-Omethyl derivative
  misc_feature (29)..(36): 2'-Omethyl derivative
  misc_feature (21)..(24): 2'-Omethyl derivative
  misc_feature (9)..(15): 2'-Omethyl derivative
  misc_feature (37)..(37): n is an inverted deoxyabasic moiety
ggcugcagccgaaaggcgagucaaggucugacacucn

SEQ ID NO: 9363 - RNA, 37 nt, Artificial Sequence
  misc_feature (1)..(4): phosphorothioate linkage
  misc_feature (17)..(17): 2'-deoxy-2'-amino derivative
  misc_feature (28)..(28): 2'-deoxy-2'-amino derivative
  misc_feature (29)..(36): 2'-Omethyl derivative
  misc_feature (27)..(27): 2'-Omethyl derivative
  misc_feature (19)..(19): 2'-Omethyl derivative
  misc_feature (21)..(24): 2'-Omethyl derivative
  misc_feature (9)..(15): 2'-Omethyl derivative
  misc_feature (1)..(7): 2'-Omethyl derivative
  misc_feature (37)..(37): n is an inverted deoxyabasic moiety
gaggcuggccgaaaggcgagucaaggucuacgacacn

SEQ ID NO: 9364 - RNA, 37 nt, Artificial Sequence
  misc_feature (1)..(4): phosphorothioate linkage
  misc_feature (17)..(17): 2'-deoxy-2'-amino derivative
  misc_feature (28)..(28): 2'-deoxy-2'-amino derivative
  misc_feature (9)..(15): 2'-Omethyl derivative
  misc_feature (27)..(27): 2'-Omethyl derivative
  misc_feature (19)..(19): 2'-Omethyl derivative
  misc_feature (29)..(36): 2'-Omethyl derivative
  misc_feature (21)..(24): 2'-Omethyl derivative
  misc_feature (1)..(7): 2'-Omethyl derivative
  misc_feature (37)..(37): n is an inverted deoxyabasic moiety
ccgcagagccgaaaggcgagucaaggucucacuaugn

SEQ ID NO: 9365 - RNA, 37 nt, Artificial Sequence
  misc_feature (1)..(4): phosphorothioate linkage
  misc_feature (17)..(17): 2'-deoxy-2'-amino derivative
  misc_feature (28)..(28): 2'-deoxy-2'-amino derivative
  misc_feature (19)..(19): 2'-Omethyl derivative
  misc_feature (29)..(36): 2'-Omethyl derivative
  misc_feature (21)..(24): 2'-Omethyl derivative
  misc_feature (27)..(27): 2'-Omethyl derivative
  misc_feature (9)..(15): 2'-Omethyl derivative
  misc_feature (1)..(7): 2'-Omethyl derivative
  misc_feature (37)..(37): n is an inverted deoxyabasic moiety
gaaaggagccgaaaggcgagucaaggucuccggucgn

SEQ ID NO: 9366 - RNA, 37 nt, Artificial Sequence
  misc_feature (1)..(4): phosphorothioate linkage
  misc_feature (17)..(17): 2'-deoxy-2'-amino derivative
  misc_feature (28)..(28): 2'-deoxy-2'-amino derivative
  misc_feature (19)..(19): 2'-Omethyl derivative
  misc_feature (21)..(24): 2'-Omethyl derivative
  misc_feature (29)..(36): 2'-Omethyl derivative
  misc_feature (27)..(27): 2'-Omethyl derivative
  misc_feature (9)..(15): 2'-Omethyl derivative
  misc_feature (1)..(7): 2'-Omethyl derivative
  misc_feature (37)..(37): n is an inverted deoxyabasic moiety
cuccagggccgaaaggcgagucaaggucuauugagcn

SEQ ID NO: 9367 - RNA, 37 nt, Artificial Sequence
  misc_feature (1)..(4): phosphorothioate linkage
  misc_feature (17)..(17): phosphorothioate linkage
  misc_feature (28)..(28): phosphorothioate linkage
  misc_feature (29)..(36): 2'-Omethyl derivative
  misc_feature (9)..(15): 2'-Omethyl derivative
  misc_feature (21)..(24): 2'-Omethyl derivative
  misc_feature (27)..(27): 2'-Omethyl derivative
  misc_feature (19)..(19): 2'-Omethyl derivative
  misc_feature (1)..(7): 2'-Omethyl derivative
  misc_feature (37)..(37): n is an inverted deoxyabasic moiety
gggcacggccgaaaggcgagucaaggucuccaaaucn

SEQ ID NO: 9368 - RNA, 37 nt, Artificial Sequence
  misc_feature (1)..(4): phosphorothioate linkage
  misc_feature (17)..(17): 2'-deoxy-2'-amino derivative
  misc_feature (28)..(28): 2'-deoxy-2'-amino derivative
  misc_feature (9)..(15): 2'-Omethyl derivative
  misc_feature (29)..(36): 2'-Omethyl derivative
  misc_feature (21)..(24): 2'-Omethyl derivative
  misc_feature (27)..(27): 2'-Omethyl derivative
  misc_feature (19)..(19): 2'-Omethyl derivative
  misc_feature (1)..(7): 2'-Omethyl derivative
  misc_feature (37)..(37): n is an inverted deoxyabasic moiety
aacacuagccgaaaggcgagucaaggucuucggcuan

SEQ ID NO: 9369 - RNA, 37 nt, Artificial Sequence
  misc_feature (1)..(4): phosphorothioate linkage
  misc_feature (17)..(17): 2'-deoxy-2'-amino derivative
  misc_feature (28)..(28): 2'-deoxy-2'-amino derivative
  misc_feature (9)..(15): 2'-Omethyl derivative
  misc_feature (1)..(7): 2'-Omethyl derivative
  misc_feature (29)..(36): 2'-Omethyl derivative
  misc_feature (27)..(27): 2'-Omethyl derivative
  misc_feature (21)..(24): 2'-Omethyl derivative
  misc_feature (19)..(19): 2'-Omethyl derivative
  misc_feature (37)..(37): n is an inverted deoxyabasic moiety
gcacucggccgaaaggcgagucaaggucuaagcaccn

SEQ ID NO: 9370 - RNA, 35 nt, Artificial Sequence
  misc_feature (1)..(4): phosphorothioate linkage
  misc_feature (16)..(16): 2'-deoxy-2'-amino derivative
  misc_feature (27)..(27): 2'-deoxy-2'-amino derivative
  misc_feature (8)..(14): 2'-Omethyl derivative
  misc_feature (1)..(6): 2'-Omethyl derivative
  misc_feature (18)..(18): 2'-Omethyl derivative
  misc_feature (20)..(23): 2'-Omethyl derivative
  misc_feature (26)..(26): 2'-Omethyl derivative
  misc_feature (28)..(34): 2'-Omethyl derivative
  misc_feature (35)..(35): n is an inverted deoxyabasic moiety
gcuagagccgaaaggcgagucaaggucugcuuucn

SEQ ID NO: 9371 - RNA, 37 nt, Artificial Sequence
  misc_feature (1)..(4): phosphorothioate linkage
  misc_feature (17)..(17): 2'-deoxy-2'-amino derivative
  misc_feature (28)..(28): 2'-deoxy-2'-amino derivative
  misc_feature (1)..(7): 2'-Omethyl derivative
  misc_feature (9)..(15): 2'-Omethyl derivative
  misc_feature (19)..(19): 2'-Omethyl derivative
  misc_feature (21)..(24): 2'-Omethyl derivative
  misc_feature (27)..(27): 2'-Omethyl derivative
  misc_feature (29)..(36): 2'-Omethyl derivative
  misc_feature (37)..(37): n is an inverted deoxyabasic moiety
ggcuagagccgaaaggcgagucaaggucugcuuucun

SEQ ID NO: 9372 - RNA, 37 nt, Artificial Sequence
  misc_feature (1)..(4): phosphorothioate linkage
  misc_feature (17)..(17): 2'-deoxy-2'-amino derivative
  misc_feature (28)..(28): 2'-deoxy-2'-amino derivative
  misc_feature (1)..(7): 2'-Omethyl derivative
  misc_feature (19)..(19): 2'-Omethyl derivative
  misc_feature (21)..(24): 2'-Omethyl derivative
  misc_feature (29)..(36): 2'-Omethyl derivative
  misc_feature (27)..(27): 2'-Omethyl derivative
  misc_feature (9)..(15): 2'-Omethyl derivative
  misc_feature (37)..(37): n is an inverted deoxyabasic moiety
acuaacggccgaaaggcgagucaaggucucauggcun

SEQ ID NO: 9373 - RNA, 37 nt, Artificial Sequence
  misc_feature (1)..(4): phosphorothioate linkage
  misc_feature (17)..(17): 2'-deoxy-2'-amino derivative
  misc_feature (28)..(28): 2'-deoxy-2'-amino derivative
  misc_feature (21)..(24): phosphorothioate linkage
  misc_feature (1)..(7): 2'-Omethyl derivative
  misc_feature (29)..(36): 2'-Omethyl derivative
  misc_feature (27)..(27): 2'-Omethyl derivative
  misc_feature (19)..(19): 2'-Omethyl derivative
  misc_feature (9)..(15): 2'-Omethyl derivative
  misc_feature (37)..(37): n is an inverted deoxyabasic moiety
acucauagccgaaaggcgagucaaggucuuaacgccn

SEQ ID NO: 9374 - RNA, 35 nt, Artificial Sequence
  misc_feature (1)..(4): phosphorothioate linkage
  misc_feature (16)..(16): 2'-deoxy-2'-amino derivative
  misc_feature (27)..(27): 2'-deoxy-2'-amino derivative
  misc_feature (1)..(6): 2'-Omethyl derivative
  misc_feature (8)..(14): 2'-Omethyl derivative
  misc_feature (18)..(18): 2'-Omethyl derivative
  misc_feature (20)..(23): 2'-Omethyl derivative
  misc_feature (26)..(26): 2'-Omethyl derivative
  misc_feature (28)..(34): 2'-Omethyl derivative
  misc_feature (35)..(35): n is an inverted deoxyabasic moiety
gcacgagccgaaaggcgagucaaggucuacucaun

SEQ ID NO: 9375 - RNA, 35 nt, Artificial Sequence
  misc_feature (1)..(4): phosphorothioate linkage
  misc_feature (16)..(16): 2'-deoxy-2'-amino derivative
  misc_feature (27)..(27): 2'-deoxy-2'-amino derivative
  misc_feature (1)..(6): 2'-Omethyl derivative
  misc_feature (8)..(14): 2'-Omethyl derivative
  misc_feature (18)..(18): 2'-Omethyl derivative
  misc_feature (20)..(23): 2'-Omethyl derivative
  misc_feature (26)..(26): 2'-Omethyl derivative
  misc_feature (28)..(34): 2'-Omethyl derivative
  misc_feature (35)..(35): n is an inverted deoxyabasic moiety
gcugcagccgaaaggcgagucaaggucugacacun

SEQ ID NO: 9376 - RNA, 37 nt, Artificial Sequence
  misc_feature (1)..(4): phosphorothioate linkage
  misc_feature (17)..(17): 2'-deoxy-2'-amino derivative
  misc_feature (28)..(28): 2'-deoxy-2'-amino derivative
  misc_feature (1)..(7): 2'-Omethyl derivative
  misc_feature (9)..(15): 2'-Omethyl derivative
  misc_feature (19)..(19): 2'-Omethyl derivative
  misc_feature (21)..(24): 2'-Omethyl derivative
  misc_feature (27)..(27): 2'-Omethyl derivative
  misc_feature (29)..(36): 2'-Omethyl derivative
  misc_feature (37)..(37): n is an inverted deoxyabasic moiety
cuggagggccgaaaggcgagucaaggucuugcacgan

SEQ ID NO: 9377 - RNA, 35 nt, Artificial Sequence
  misc_feature (1)..(4): phosphorothioate linkage
  misc_feature (16)..(16): 2'-deoxy-2'-amino derivative
  misc_feature (27)..(27): 2'-deoxy-2'-amino derivative
  misc_feature (1)..(6): 2'-Omethyl derivative
  misc_feature (8)..(14): 2'-Omethyl derivative
  misc_feature (18)..(18): 2'-Omethyl derivative
  misc_feature (20)..(23): 2'-Omethyl derivative
  misc_feature (26)..(26): 2'-Omethyl derivative
  misc_feature (28)..(34): 2'-Omethyl derivative
  misc_feature (35)..(35): n is an inverted deoxyabasic moiety
cuaugggccgaaaggcgagucaaggucuucucccn

SEQ ID NO: 9378 - RNA, 37 nt, Artificial Sequence
  misc_feature (1)..(4): phosphorothioate linkage
  misc_feature (17)..(17): 2'-deoxy-2'-amino derivative
  misc_feature (28)..(28): 2'-deoxy-2'-amino derivative
  misc_feature (1)..(7): 2'-Omethyl derivative
  misc_feature (9)..(15): 2'-Omethyl derivative
  misc_feature (19)..(19): 2'-Omethyl derivative
  misc_feature (21)..(24): 2'-Omethyl derivative
  misc_feature (27)..(27): 2'-Omethyl derivative
  misc_feature (29)..(36): 2'-Omethyl derivative
  misc_feature (37)..(37): n is an inverted deoxyabasic moiety
acuaugggccgaaaggcgagucaaggucuucucccgn

SEQ ID NO: 9379 - RNA, 35 nt, Artificial Sequence
  misc_feature (1)..(4): phosphorothioate linkage
  misc_feature (16)..(16): 2'-deoxy-2'-amino derivative
  misc_feature (27)..(27): 2'-deoxy-2'-amino derivative
  misc_feature (1)..(6): 2'-Omethyl derivative
  misc_feature (8)..(14): 2'-Omethyl derivative
  misc_feature (18)..(18): 2'-Omethyl derivative
  misc_feature (20)..(23): 2'-Omethyl derivative
  misc_feature (26)..(26): 2'-Omethyl derivative
  misc_feature (28)..(34): 2'-Omethyl derivative
  misc_feature (35)..(35): n is an inverted deoxyabasic moiety
cgcagagccgaaaggcgagucaaggucucacuaun

SEQ ID NO: 9380 - RNA, 37 nt, Artificial Sequence
  misc_feature (1)..(4): phosphorothioate linkage
  misc_feature (17)..(17): 2'-deoxy-2'-amino derivative
  misc_feature (28)..(28): 2'-deoxy-2'-amino derivative
  misc_feature (1)..(7): 2'-Omethyl derivative
  misc_feature (9)..(15): 2'-Omethyl derivative
  misc_feature (19)..(19): 2'-Omethyl derivative
  misc_feature (21)..(24): 2'-Omethyl derivative
  misc_feature (27)..(27): 2'-Omethyl derivative
  misc_feature (29)..(36): 2'-Omethyl derivative
  misc_feature (37)..(37): n is an inverted deoxyabasic moiety
gguuccggccgaaaggcgagucaaggucuagaccacn

SEQ ID NO: 9381 - RNA, 37 nt, Artificial Sequence
  misc_feature (1)..(4): phosphorothioate linkage
  misc_feature (17)..(17): 2'-deoxy-2'-amino derivative
  misc_feature (28)..(28): 2'-deoxy-2'-amino derivative
  misc_feature (1)..(7): 2'-Omethyl derivative
  misc_feature (9)..(15): 2'-Omethyl derivative
  misc_feature (19)..(19): 2'-Omethyl derivative
  misc_feature (21)..(24): 2'-Omethyl derivative
  misc_feature (27)..(27): 2'-Omethyl derivative
  misc_feature (29)..(36): 2'-Omethyl derivative
  misc_feature (37)..(37): n is an inverted deoxyabasic moiety
guccugggccgaaaggcgagucaaggucuaauuccgn

SEQ ID NO: 9382 - RNA, 35 nt, Artificial Sequence
  misc_feature (1)..(4): phosphorothioate linkage
  misc_feature (16)..(16): 2'-deoxy-2'-amino derivative
  misc_feature (27)..(27): 2'-deoxy-2'-amino derivative
  misc_feature (1)..(6): 2'-Omethyl derivative
  misc_feature (8)..(14): 2'-Omethyl derivative
  misc_feature (18)..(18): 2'-Omethyl derivative
  misc_feature (20)..(23): 2'-Omethyl derivative
  misc_feature (26)..(26): 2'-Omethyl derivative
  misc_feature (28)..(34): 2'-Omethyl derivative
  misc_feature (35)..(35): n is an inverted deoxyabasic moiety
aaaggagccgaaaggcgagucaaggucuccggucn

SEQ ID NO: 9383 - RNA, 35 nt, Artificial Sequence
  misc_feature (1)..(4): phosphorothioate linkage
  misc_feature (16)..(16): 2'-deoxy-2'-amino derivative
  misc_feature (27)..(27): 2'-deoxy-2'-amino derivative
  misc_feature (1)..(6): 2'-Omethyl derivative
  misc_feature (8)..(14): 2'-Omethyl derivative
  misc_feature (18)..(18): 2'-Omethyl derivative
  misc_feature (20)..(23): 2'-Omethyl derivative
  misc_feature (26)..(26): 2'-Omethyl derivative
  misc_feature (28)..(34): 2'-Omethyl derivative
  misc_feature (35)..(35): n is an inverted deoxyabasic moiety
acucgggccgaaaggcgagucaaggucuuagcagn

SEQ ID NO: 9384 - RNA, 37 nt, Artificial Sequence
  misc_feature (1)..(4): phosphorothioate linkage
  misc_feature (17)..(17): 2'-deoxy-2'-amino derivative
  misc_feature (28)..(28): 2'-deoxy-2'-amino derivative
  misc_feature (1)..(7): 2'-Omethyl derivative
  misc_feature (9)..(15): 2'-Omethyl derivative
  misc_feature (19)..(19): 2'-Omethyl derivative
  misc_feature (21)..(24): 2'-Omethyl derivative
  misc_feature (27)..(27): 2'-Omethyl derivative
  misc_feature (29)..(36): 2'-Omethyl derivative
  misc_feature (37)..(37): n is an inverted deoxyabasic moiety
uacucgggccgaaaggcgagucaaggucuuagcagun

SEQ ID NO: 9385 - RNA, 35 nt, Artificial Sequence
  misc_feature (1)..(4): phosphorothioate linkage
  misc_feature (16)..(16): 2'-deoxy-2'-amino derivative
  misc_feature (27)..(27): 2'-deoxy-2'-amino derivative
  misc_feature (1)..(6): 2'-Omethyl derivative
  misc_feature (8)..(14): 2'-Omethyl derivative
  misc_feature (20)..(23): 2'-Omethyl derivative
  misc_feature (26)..(26): 2'-Omethyl derivative
  misc_feature (28)..(34): 2'-Omethyl derivative
  misc_feature (35)..(35): n is an inverted deoxyabasic moiety
acacuagccgaaaggcgagucaaggucuucggcun

SEQ ID NO: 9386 - RNA, 37 nt, Artificial Sequence
  misc_feature (1)..(4): phosphorothioate linkage
  misc_feature (17)..(17): 2'-deoxy-2'-amino derivative
  misc_feature (28)..(28): 2'-deoxy-2'-amino derivative
  misc_feature (1)..(7): 2'-Omethyl derivative
  misc_feature (9)..(15): 2'-Omethyl derivative
  misc_feature (19)..(19): 2'-Omethyl derivative
  misc_feature (21)..(24): 2'-Omethyl derivative
  misc_feature (27)..(27): 2'-Omethyl derivative
  misc_feature (29)..(36): 2'-Omethyl derivative
  misc_feature (37)..(37): n is an inverted deoxyabasic moiety
gacccaagccgaaaggcgagucaaggucuacuacucn

SEQ ID NO: 9387 - RNA, 35 nt, Artificial Sequence
  misc_feature (1)..(4): phosphorothioate linkage
  misc_feature (16)..(16): 2'-deoxy-2'-amino derivative
  misc_feature (27)..(27): 2'-deoxy-2'-amino derivative
  misc_feature (1)..(6): 2'-Omethyl derivative
  misc_feature (8)..(14): 2'-Omethyl derivative
  misc_feature (18)..(18): 2'-Omethyl derivative
  misc_feature (20)..(23): 2'-Omethyl derivative
  misc_feature (26)..(26): 2'-Omethyl derivative
  misc_feature (28)..(34): 2'-Omethyl derivative
  misc_feature (35)..(35): n is an inverted deoxyabasic moiety
ucgcgagccgaaaggcgagucaaggucuccaacan

SEQ ID NO: 9388 - RNA, 37 nt, Artificial Sequence
  misc_feature (1)..(4): phosphorothioate linkage
  misc_feature (17)..(17): 2'-deoxy-2'-amino derivative
  misc_feature (28)..(28): 2'-deoxy-2'-amino derivative
  misc_feature (1)..(7): 2'-Omethyl derivative
  misc_feature (9)..(15): 2'-Omethyl derivative
  misc_feature (19)..(19): 2'-Omethyl derivative
  misc_feature (21)..(24): 2'-Omethyl derivative
  misc_feature (27)..(27): 2'-Omethyl derivative
  misc_feature (29)..(36): 2'-Omethyl derivative
  misc_feature (37)..(37): n is an inverted deoxyabasic moiety
uucgcgagccgaaaggcgagucaaggucuccaacacn

SEQ ID NO: 9389 - RNA, 37 nt, Artificial Sequence
  misc_feature (1)..(4): phosphorothioate linkage
  misc_feature (17)..(17): 2'-deoxy-2'-amino derivative
  misc_feature (28)..(28): 2'-deoxy-2'-amino derivative
  misc_feature (1)..(7): 2'-Omethyl derivative
  misc_feature (9)..(15): 2'-Omethyl derivative
  misc_feature (27)..(27): 2'-Omethyl derivative
  misc_feature (29)..(36): 2'-Omethyl derivative
  misc_feature (19)..(19): 2'-Omethyl derivative
  misc_feature (21)..(24): 2'-Omethyl derivative
  misc_feature (37)..(37): n is an inverted deoxyabasic moiety
ccuuucggccgaaaggcgagucaaggucugacccaan

SEQ ID NO: 9390 - RNA, 37 nt, Artificial Sequence
  misc_feature (1)..(4): phosphorothioate linkage
  misc_feature (17)..(17): 2'-deoxy-2'-amino derivative
  misc_feature (28)..(28): 2'-deoxy-2'-amino derivative
  misc_feature (1)..(7): 2'-Omethyl derivative
  misc_feature (27)..(27): 2'-Omethyl derivative
  misc_feature (29)..(36): 2'-Omethyl derivative
  misc_feature (9)..(15): 2'-Omethyl derivative
  misc_feature (21)..(24): 2'-Omethyl derivative
  misc_feature (19)..(19): 2'-Omethyl derivative
  misc_feature (37)..(37): n is an inverted deoxyabasic moiety
aguaccagccgaaaggcgagucaaggucuaaggccun

SEQ ID NO: 9391 - RNA, 37 nt, Artificial Sequence
  misc_feature (1)..(4): phosphorothioate linkage
  misc_feature (17)..(17): 2'-deoxy-2'-amino derivative
  misc_feature (28)..(28): 2'-deoxy-2'-amino derivative
  misc_feature (19)..(19): 2'-Omethyl derivative
  misc_feature (27)..(27): 2'-Omethyl derivative
  misc_feature (29)..(36): 2'-Omethyl derivative
  misc_feature (9)..(15): 2'-Omethyl derivative
  misc_feature (21)..(24): 2'-Omethyl derivative
  misc_feature (1)..(7): 2'-Omethyl derivative
  misc_feature (37)..(37): n is an inverted deoxyabasic moiety
ggcaguagccgaaaggcgagucaaggucucacaaggn

SEQ ID NO: 9392 - RNA, 37 nt, Artificial Sequence
  misc_feature (1)..(4): phosphorothioate linkage
  misc_feature (17)..(17): 2'-deoxy-2'-amino derivative
  misc_feature (28)..(28): 2'-deoxy-2'-amino derivative
  misc_feature (9)..(15): 2'-Omethyl derivative
  misc_feature (27)..(27): 2'-Omethyl derivative
  misc_feature (21)..(24): 2'-Omethyl derivative
  misc_feature (29)..(36): 2'-Omethyl derivative
  misc_feature (19)..(19): 2'-Omethyl derivative
  misc_feature (1)..(7): 2'-Omethyl derivative
  misc_feature (37)..(37): n is an inverted deoxyabasic moiety
uaucagggccgaaaggcgagucaaggucuaguaccan

SEQ ID NO: 9393 - RNA, 37 nt, Artificial Sequence
  misc_feature (1)..(4): phosphorothioate linkage
  misc_feature (17)..(17): 2'-deoxy-2'-amino derivative
  misc_feature (28)..(28): 2'-deoxy-2'-amino derivative
  misc_feature (9)..(15): 2'-Omethyl derivative
  misc_feature (1)..(7): 2'-Omethyl derivative
  misc_feature (29)..(36): 2'-Omethyl derivative
  misc_feature (27)..(27): 2'-Omethyl derivative
  misc_feature (21)..(24): 2'-Omethyl derivative
  misc_feature (19)..(19): 2'-Omethyl derivative
  misc_feature (37)..(37): n is an inverted deoxyabasic moiety
gcaagcagccgaaaggcgagucaaggucuccuaucan

SEQ ID NO: 9394 - RNA, 37 nt, Artificial Sequence
  misc_feature (1)..(4): phosphorothioate linkage
  misc_feature (17)..(17): 2'-deoxy-2'-amino derivative
  misc_feature (28)..(28): 2'-deoxy-2'-amino derivative
  misc_feature (29)..(36): phosphorothioate linkage
  misc_feature (1)..(7): 2'-Omethyl derivative
  misc_feature (9)..(15): 2'-Omethyl derivative
  misc_feature (21)..(24): 2'-Omethyl derivative
  misc_feature (27)..(27): 2'-Omethyl derivative
  misc_feature (19)..(19): 2'-Omethyl derivative
  misc_feature (37)..(37): n is an inverted deoxyabasic moiety
ucgcaaggccgaaaggcgagucaaggucuacccuaun

SEQ ID NO: 9395 - RNA, 35 nt, Artificial Sequence
  misc_feature (1)..(4): phosphorothioate linkage
  misc_feature (16)..(16): 2'-deoxy-2'-amino derivative
  misc_feature (27)..(27): 2'-deoxy-2'-amino derivative
  misc_feature (1)..(6): 2'-Omethyl derivative
  misc_feature (8)..(14): 2'-Omethyl derivative
  misc_feature (18)..(18): 2'-Omethyl derivative
  misc_feature (20)..(23): 2'-Omethyl derivative
  misc_feature (26)..(26): 2'-Omethyl derivative
  misc_feature (28)..(34): 2'-Omethyl derivative
  misc_feature (35)..(35): n is an inverted deoxyabasic moiety
ugaagagccgaaaggcgagucaaggucuaguagun

SEQ ID NO: 9396 - RNA, 37 nt, Artificial Sequence
  misc_feature (1)..(4): phosphorothioate linkage
  misc_feature (17)..(17): 2'-deoxy-2'-amino derivative
  misc_feature (28)..(28): 2'-deoxy-2'-amino derivative
  misc_feature (1)..(7): 2'-Omethyl derivative
  misc_feature (9)..(15): 2'-Omethyl derivative
  misc_feature (19)..(19): 2'-Omethyl derivative
  misc_feature (21)..(24): 2'-Omethyl derivative
  misc_feature (27)..(27): 2'-Omethyl derivative
  misc_feature (29)..(36): 2'-Omethyl derivative
  misc_feature (37)..(37): n is an inverted deoxyabasic moiety
gugaagagccgaaaggcgagucaaggucuaguaguun

SEQ ID NO: 9397 - RNA, 37 nt, Artificial Sequence
  misc_feature (1)..(4): phosphorothioate linkage
  misc_feature (17)..(17): 2'-deoxy-2'-amino derivative
  misc_feature (28)..(28): 2'-deoxy-2'-amino derivative
  misc_feature (1)..(7): 2'-Omethyl derivative
  misc_feature (9)..(15): 2'-Omethyl derivative
  misc_feature (19)..(19): 2'-Omethyl derivative
  misc_feature (21)..(24): 2'-Omethyl derivative
  misc_feature (27)..(27): 2'-Omethyl derivative
  misc_feature (29)..(36): 2'-Omethyl derivative
  misc_feature (37)..(37): n is an inverted deoxyabasic moiety
cuuucuggccgaaaggcgagucaaggucugugaagan

SEQ ID NO: 9398 - RNA, 35 nt, Artificial Sequence
  misc_feature (1)..(4): phosphorothioate linkage
  misc_feature (16)..(16): 2'-deoxy-2'-amino derivative
  misc_feature (27)..(27): 2'-deoxy-2'-amino derivative
  misc_feature (1)..(6): 2'-Omethyl derivative
  misc_feature (8)..(14): 2'-Omethyl derivative
  misc_feature (18)..(18): 2'-Omethyl derivative
  misc_feature (20)..(23): 2'-Omethyl derivative
  misc_feature (26)..(26): 2'-Omethyl derivative
  misc_feature (28)..(34): 2'-Omethyl derivative
  misc_feature (35)..(35): n is an inverted deoxyabasic moiety
uagacggccgaaaggcgagucaaggucuuuucugn

SEQ ID NO: 9399 - RNA, 35 nt, Artificial Sequence
  misc_feature (1)..(4): phosphorothioate linkage
  misc_feature (16)..(16): 2'-deoxy-2'-amino derivative
  misc_feature (27)..(27): 2'-deoxy-2'-amino derivative
  misc_feature (1)..(6): 2'-Omethyl derivative
  misc_feature (28)..(34): 2'-Omethyl derivative
  misc_feature (18)..(18): 2'-Omethyl derivative
  misc_feature (20)..(23): 2'-Omethyl derivative
  misc_feature (26)..(26): 2'-Omethyl derivative
  misc_feature (8)..(14): 2'-Omethyl derivative
  misc_feature (35)..(35): n is an inverted deoxyabasic moiety
ccaugggccgaaaggcgagucaaggucuuagacgn

SEQ ID NO: 9400 - RNA, 35 nt, Artificial Sequence
  misc_feature (1)..(4): phosphorothioate linkage
  misc_feature (16)..(16): 2'-deoxy-2'-amino derivative
  misc_feature (27)..(27): 2'-deoxy-2'-amino derivative
  misc_feature (1)..(6): 2'-Omethyl derivative
  misc_feature (28)..(34): 2'-Omethyl derivative
  misc_feature (18)..(18): 2'-Omethyl derivative
  misc_feature (20)..(23): 2'-Omethyl derivative
  misc_feature (26)..(26): 2'-Omethyl derivative
  misc_feature (8)..(14): 2'-Omethyl derivative
  misc_feature (35)..(35): n is an inverted deoxyabasic moiety
cuaacggccgaaaggcgagucaaggucucauggcn

SEQ ID NO: 9401 - RNA, 35 nt, Artificial Sequence
  misc_feature (1)..(4): phosphorothioate linkage
  misc_feature (16)..(16): 2'-deoxy-2'-amino derivative
  misc_feature (27)..(27): 2'-deoxy-2'-amino derivative
  misc_feature (26)..(26): 2'-Omethyl derivative
  misc_feature (28)..(34): 2'-Omethyl derivative
  misc_feature (20)..(23): phosphorothioate linkage
  misc_feature (1)..(6): 2'-Omethyl derivative
  misc_feature (18)..(18): 2'-Omethyl derivative
  misc_feature (8)..(14): 2'-Omethyl derivative
  misc_feature (35)..(35): n is an inverted deoxyabasic moiety
uacuaagccgaaaggcgagucaaggucugccaugn

SEQ ID NO: 9402 - RNA, 37 nt, Artificial Sequence
  misc_feature (1)..(4): phosphorothioate linkage
  misc_feature (17)..(17): 2'-deoxy-2'-amino derivative
  misc_feature (28)..(28): 2'-deoxy-2'-amino derivative
  misc_feature (1)..(7): 2'-Omethyl derivative
  misc_feature (9)..(15): 2'-Omethyl derivative
  misc_feature (19)..(19): 2'-Omethyl derivative
  misc_feature (21)..(24): 2'-Omethyl derivative
  misc_feature (27)..(27): 2'-Omethyl derivative
  misc_feature (29)..(36): 2'-Omethyl derivative
  misc_feature (37)..(37): n is an inverted deoxyabasic moiety
auacuaagccgaaaggcgagucaaggucugccauggn

SEQ ID NO: 9403 - RNA, 35 nt, Artificial Sequence
  misc_feature (1)..(4): phosphorothioate linkage
  misc_feature (16)..(16): 2'-deoxy-2'-amino derivative
  misc_feature (27)..(27): 2'-deoxy-2'-amino derivative
  misc_feature (1)..(6): 2'-Omethyl derivative
  misc_feature (8)..(14): 2'-Omethyl derivative
  misc_feature (18)..(18): 2'-Omethyl derivative
  misc_feature (20)..(23): 2'-Omethyl derivative
  misc_feature (26)..(26): 2'-Omethyl derivative
  misc_feature (28)..(34): 2'-Omethyl derivative
  misc_feature (35)..(35): n is an inverted deoxyabasic moiety
acgacagccgaaaggcgagucaaggucuucauacn

SEQ ID NO: 9404 - RNA, 35 nt, Artificial Sequence
  misc_feature (1)..(4): phosphorothioate linkage
  misc_feature (16)..(16): 2'-deoxy-2'-amino derivative
  misc_feature (27)..(27): 2'-deoxy-2'-amino derivative
  misc_feature (1)..(6): 2'-Omethyl derivative
  misc_feature (8)..(14): 2'-Omethyl derivative
  misc_feature (18)..(18): 2'-Omethyl derivative
  misc_feature (20)..(23): 2'-Omethyl derivative
  misc_feature (26)..(26): 2'-Omethyl derivative
  misc_feature (28)..(34): 2'-Omethyl derivative
  misc_feature (35)..(35): n is an inverted deoxyabasic moiety
aggcuggccgaaaggcgagucaaggucuacgacan

SEQ ID NO: 9405 - RNA, 35 nt, Artificial Sequence
  misc_feature (1)..(4): phosphorothioate linkage
  misc_feature (16)..(16): 2'-deoxy-2'-amino derivative
  misc_feature (27)..(27): 2'-deoxy-2'-amino derivative
  misc_feature (1)..(6): 2'-Omethyl derivative
  misc_feature (8)..(14): 2'-Omethyl derivative
  misc_feature (18)..(18): 2'-Omethyl derivative
  misc_feature (20)..(23): 2'-Omethyl derivative
  misc_feature (26)..(26): 2'-Omethyl derivative
  misc_feature (28)..(34): 2'-Omethyl derivative
  misc_feature (35)..(35): n is an inverted deoxyabasic moiety
uggagggccgaaaggcgagucaaggucuugcacgn

SEQ ID NO: 9406 - RNA, 35 nt, Artificial Sequence
  misc_feature (1)..(4): phosphorothioate linkage
  misc_feature (16)..(16): 2'-deoxy-2'-amino derivative
  misc_feature (27)..(27): 2'-deoxy-2'-amino derivative
  misc_feature (1)..(6): 2'-Omethyl derivative
  misc_feature (8)..(14): 2'-Omethyl derivative
  misc_feature (18)..(18): 2'-Omethyl derivative
  misc_feature (20)..(23): 2'-Omethyl derivative
  misc_feature (26)..(26): 2'-Omethyl derivative
  misc_feature (28)..(34): 2'-Omethyl derivative
  misc_feature (35)..(35): n is an inverted deoxyabasic moiety
guuccggccgaaaggcgagucaaggucuagaccan

SEQ ID NO: 9407 - RNA, 37 nt, Artificial Sequence
  misc_feature (1)..(4): phosphorothioate linkage
  misc_feature (17)..(17): 2'-deoxy-2'-amino derivative
  misc_feature (28)..(28): 2'-deoxy-2'-amino derivative
  misc_feature (1)..(7): 2'-Omethyl derivative
  misc_feature (9)..(15): 2'-Omethyl derivative
  misc_feature (19)..(19): 2'-Omethyl derivative
  misc_feature (21)..(24): 2'-Omethyl derivative
  misc_feature (27)..(27): 2'-Omethyl derivative
  misc_feature (29)..(36): 2'-Omethyl derivative
  misc_feature (37)..(37): n is an inverted deoxyabasic moiety
guacucagccgaaaggcgagucaaggucucgguuccn

SEQ ID NO: 9408 - RNA, 35 nt, Artificial Sequence
  misc_feature (1)..(4): phosphorothioate linkage
  misc_feature (16)..(16): 2'-deoxy-2'-amino derivative
  misc_feature (27)..(27): 2'-deoxy-2'-amino derivative
  misc_feature (1)..(6): 2'-Omethyl derivative
  misc_feature (8)..(14): 2'-Omethyl derivative
  misc_feature (18)..(18): 2'-Omethyl derivative
  misc_feature (20)..(23): 2'-Omethyl derivative
  misc_feature (26)..(26): 2'-Omethyl derivative
  misc_feature (28)..(34): 2'-Omethyl derivative
  misc_feature (35)..(35): n is an inverted deoxyabasic moiety
uccugggccgaaaggcgagucaaggucuaauuccn

SEQ ID NO: 9409 - RNA, 35 nt, Artificial Sequence
  misc_feature (1)..(4): phosphorothioate linkage
  misc_feature (16)..(16): 2'-deoxy-2'-amino derivative
  misc_feature (27)..(27): 2'-deoxy-2'-amino derivative
  misc_feature (1)..(6): 2'-Omethyl derivative
  misc_feature (8)..(14): 2'-Omethyl derivative
  misc_feature (18)..(18): 2'-Omethyl derivative
  misc_feature (20)..(23): 2'-Omethyl derivative
  misc_feature (26)..(26): 2'-Omethyl derivative
  misc_feature (28)..(34): 2'-Omethyl derivative
  misc_feature (35)..(35): n is an inverted deoxyabasic moiety
uccagggccgaaaggcgagucaaggucuauugagn

SEQ ID NO: 9410 - RNA, 35 nt, Artificial Sequence
  misc_feature (1)..(4): phosphorothioate linkage
  misc_feature (16)..(16): 2'-deoxy-2'-amino derivative
  misc_feature (27)..(27): 2'-deoxy-2'-amino derivative
  misc_feature (1)..(6): 2'-Omethyl derivative
  misc_feature (8)..(14): 2'-Omethyl derivative
  misc_feature (18)..(18): 2'-Omethyl derivative
  misc_feature (20)..(23): 2'-Omethyl derivative
  misc_feature (26)..(26): 2'-Omethyl derivative
  misc_feature (28)..(34): 2'-Omethyl derivative
  misc_feature (35)..(35): n is an inverted deoxyabasic moiety
ggcacggccgaaaggcgagucaaggucuccaaaun

SEQ ID NO: 9411 - RNA, 35 nt, Artificial Sequence
  misc_feature (1)..(4): phosphorothioate linkage
  misc_feature (16)..(16): 2'-deoxy-2'-amino derivative
  misc_feature (27)..(27): 2'-deoxy-2'-amino derivative
  misc_feature (1)..(6): 2'-Omethyl derivative
  misc_feature (8)..(14): 2'-Omethyl derivative
  misc_feature (18)..(18): 2'-Omethyl derivative
  misc_feature (20)..(23): 2'-Omethyl derivative
  misc_feature (26)..(26): 2'-Omethyl derivative
  misc_feature (28)..(34): 2'-Omethyl derivative
  misc_feature (35)..(35): n is an inverted deoxyabasic moiety
ccaacagccgaaaggcgagucaaggucuuacucgn

SEQ ID NO: 9412 - RNA, 37 nt, Artificial Sequence
  misc_feature (1)..(4): phosphorothioate linkage
  misc_feature (17)..(17): 2'-deoxy-2'-amino derivative
  misc_feature (28)..(28): 2'-deoxy-2'-amino derivative
  misc_feature (1)..(7): 2'-Omethyl derivative
  misc_feature (9)..(15): 2'-Omethyl derivative
  misc_feature (19)..(19): 2'-Omethyl derivative
  misc_feature (21)..(24): 2'-Omethyl derivative
  misc_feature (27)..(27): 2'-Omethyl derivative
  misc_feature (29)..(36): 2'-Omethyl derivative
  misc_feature (37)..(37): n is an inverted deoxyabasic moiety
cccaacagccgaaaggcgagucaaggucuuacucggn

SEQ ID NO: 9413 - RNA, 35 nt, Artificial Sequence
  misc_feature (1)..(4): phosphorothioate linkage
  misc_feature (16)..(16): 2'-deoxy-2'-amino derivative
  misc_feature (27)..(27): 2'-deoxy-2'-amino derivative
  misc_feature (1)..(6): 2'-Omethyl derivative
  misc_feature (8)..(14): 2'-Omethyl derivative
  misc_feature (18)..(18): 2'-Omethyl derivative
  misc_feature (20)..(23): 2'-Omethyl derivative
  misc_feature (26)..(26): 2'-Omethyl derivative
  misc_feature (28)..(34): 2'-Omethyl derivative
  misc_feature (35)..(35): n is an inverted deoxyabasic moiety
acccaagccgaaaggcgagucaaggucuacuacun

SEQ ID NO: 9414 - RNA, 35 nt, Artificial Sequence
  misc_feature (1)..(4): phosphorothioate linkage
  misc_feature (16)..(16): 2'-deoxy-2'-amino derivative
  misc_feature (27)..(27): 2'-deoxy-2'-amino derivative
  misc_feature (1)..(6): 2'-Omethyl derivative
  misc_feature (8)..(14): 2'-Omethyl derivative
  misc_feature (18)..(18): 2'-Omethyl derivative
  misc_feature (20)..(23): 2'-Omethyl derivative
  misc_feature (26)..(26): 2'-Omethyl derivative
  misc_feature (28)..(34): 2'-Omethyl derivative
  misc_feature (35)..(35): n is an inverted deoxyabasic moiety
cuuucggccgaaaggcgagucaaggucugacccan

SEQ ID NO: 9415 - RNA, 35 nt, Artificial Sequence
  misc_feature (1)..(4): phosphorothioate linkage
  misc_feature (16)..(16): 2'-deoxy-2'-amino derivative
  misc_feature (27)..(27): 2'-deoxy-2'-amino derivative
  misc_feature (1)..(6): 2'-Omethyl derivative
  misc_feature (8)..(14): 2'-Omethyl derivative
  misc_feature (18)..(18): 2'-Omethyl derivative
  misc_feature (20)..(23): 2'-Omethyl derivative
  misc_feature (26)..(26): 2'-Omethyl derivative
  misc_feature (28)..(34): 2'-Omethyl derivative
  misc_feature (35)..(5): n is an inverted deoxyabasic moiety
guaccagccgaaaggcgagucaaggucuaaggccn

SEQ ID NO: 9416 - RNA, 35 nt, Artificial Sequence
  misc_feature (1)..(4): phosphorothioate linkage
  misc_feature (16)..(16): 2'-deoxy-2'-amino derivative
  misc_feature (27)..(27): 2'-deoxy-2'-amino derivative
  misc_feature (1)..(6): 2'-Omethyl derivative
  misc_feature (8)..(14): 2'-Omethyl derivative
  misc_feature (18)..(18): 2'-Omethyl derivative
  misc_feature (20)..(23): 2'-Omethyl derivative
  misc_feature (26)..(26): 2'-Omethyl derivative
  misc_feature (28)..(34): 2'-Omethyl derivative
  misc_feature (35)..(35): n is an inverted deoxyabasic moiety
aucagggccgaaaggcgagucaaggucuaguaccn

SEQ ID NO: 9417 - RNA, 35 nt, Artificial Sequence
  misc_feature (1)..(4): phosphorothioate linkage
  misc_feature (16)..(16): 2'-deoxy-2'-amino derivative
  misc_feature (27)..(27): 2'-deoxy-2'-amino derivative
  misc_feature (1)..(6): 2'-Omethyl derivative
  misc_feature (8)..(14): 2'-Omethyl derivative
  misc_feature (18)..(18): 2'-Omethyl derivative
  misc_feature (20)..(23): 2'-Omethyl derivative
  misc_feature (26)..(26): 2'-Omethyl derivative
  misc_feature (28)..(34): 2'-Omethyl derivative
  misc_feature (35)..(35): n is an inverted deoxyabasic moiety
cgcaaggccgaaaggcgagucaaggucuacccuan

SEQ ID NO: 9418 - RNA, 35 nt, Artificial Sequence
  misc_feature (1)..(4): phosphorothioate linkage
  misc_feature (16)..(16): 2'-deoxy-2'-amino derivative
  misc_feature (27)..(27): 2'-deoxy-2'-amino derivative
  misc_feature (1)..(6): 2'-Omethyl derivative
  misc_feature (8)..(14): 2'-Omethyl derivative
  misc_feature (18)..(18): 2'-Omethyl derivative
  misc_feature (20)..(23): 2'-Omethyl derivative
  misc_feature (26)..(26): 2'-Omethyl derivative
  misc_feature (28)..(34): 2'-Omethyl derivative
  misc_feature (35)..(35): n is an inverted deoxyabasic moiety
cacucggccgaaaggcgagucaaggucuaagcacn

SEQ ID NO: 9419 - RNA, 35 nt, Artificial Sequence
  misc_feature (1)..(4): phosphorothioate linkage
  misc_feature (16)..(16): 2'-deoxy-2'-amino derivative
  misc_feature (27)..(27): 2'-deoxy-2'-amino derivative
  misc_feature (1)..(6): 2'-Omethyl derivative
  misc_feature (8)..(14): 2'-Omethyl derivative
  misc_feature (18)..(18): 2'-Omethyl derivative
  misc_feature (20)..(23): 2'-Omethyl derivative
  misc_feature (26)..(26): 2'-Omethyl derivative
  misc_feature (28)..(34): 2'-Omethyl derivative
  misc_feature (35)..(35): n is an inverted deoxyabasic moiety
acgagagccgaaaggcgagucaaggucucucccgn

SEQ ID NO: 9420 - RNA, 37 nt, Artificial Sequence
  misc_feature (1)..(4): phosphorothioate linkage
  misc_feature (17)..(17): 2'-deoxy-2'-amino derivative
  misc_feature (28)..(28): 2'-deoxy-2'-amino derivative
  misc_feature (1)..(7): 2'-Omethyl derivative
  misc_feature (9)..(15): 2'-Omethyl derivative
  misc_feature (19)..(19): 2'-Omethyl derivative
  misc_feature (21)..(24): 2'-Omethyl derivative
  misc_feature (27)..(27): 2'-Omethyl derivative
  misc_feature (29)..(36): 2'-Omethyl derivative
  misc_feature (37)..(37): n is an inverted deoxyabasic moiety
uacgagagccgaaaggcgagucaaggucucucccggn

SEQ ID NO: 9421 - RNA, 37 nt, Artificial Sequence
  misc_feature (1)..(4): phosphorothioate linkage
  misc_feature (17)..(17): 2'-deoxy-2'-amino derivative
  misc_feature (28)..(28): 2'-deoxy-2'-amino derivative
  misc_feature (1)..(7): 2'-Omethyl derivative
  misc_feature (9)..(15): 2'-Omethyl derivative
  misc_feature (19)..(19): 2'-Omethyl derivative
  misc_feature (21)..(24): 2'-Omethyl derivative
  misc_feature (27)..(27): 2'-Omethyl derivative
  misc_feature (29)..(36): 2'-Omethyl derivative
  misc_feature (37)..(37): n is an inverted deoxyabasic moiety
cuagacggccgaaaggcgagucaaggucuuuucugcn

SEQ ID NO: 9422 - RNA, 35 nt, Artificial Sequence
  misc_feature (1)..(4): phosphorothioate linkage
  misc_feature (16)..(16): 2'-deoxy-2'-amino derivative
  misc_feature (27)..(27): 2'-deoxy-2'-amino derivative
  misc_feature (1)..(6): 2'-Omethyl derivative
  misc_feature (8)..(14): 2'-Omethyl derivative
  misc_feature (18)..(18): 2'-Omethyl derivative
  misc_feature (20)..(23): 2'-Omethyl derivative
  misc_feature (26)..(26): 2'-Omethyl derivative
  misc_feature (28)..(34): 2'-Omethyl derivative
  misc_feature (35)..(35): n is an inverted deoxyabasic moiety
agaccagccgaaaggcgagucaaggucuuauggcn

SEQ ID NO: 9423 - RNA, 37 nt, Artificial Sequence
  misc_feature (1)..(4): phosphorothioate linkage
  misc_feature (17)..(17): 2'-deoxy-2'-amino derivative
  misc_feature (28)..(28): 2'-deoxy-2'-amino derivative
  misc_feature (1)..(7): 2'-Omethyl derivative
  misc_feature (9)..(15): 2'-Omethyl derivative
  misc_feature (19)..(19): 2'-Omethyl derivative
  misc_feature (21)..(24): 2'-Omethyl derivative
  misc_feature (27)..(27): 2'-Omethyl derivative
  misc_feature (29)..(36): 2'-Omethyl derivative
  misc_feature (37)..(37): n is an inverted deoxyabasic moiety
cacaagggccgaaaggcgagucaaggucucuuucgcn

SEQ ID NO: 9424 - RNA, 35 nt, Artificial Sequence
  misc_feature (1)..(4): phosphorothioate linkage
  misc_feature (16)..(16): 2'-deoxy-2'-amino derivative
  misc_feature (27)..(27): 2'-deoxy-2'-amino derivative
  misc_feature (1)..(6): 2'-Omethyl derivative
  misc_feature (8)..(14): 2'-Omethyl derivative
  misc_feature (18)..(18): 2'-Omethyl derivative
  misc_feature (20)..(23): 2'-Omethyl derivative
  misc_feature (26)..(26): 2'-Omethyl derivative
  misc_feature (28)..(34): 2'-Omethyl derivative
  misc_feature (35)..(35): n is an inverted deoxyabasic moiety
gguguagccgaaaggcgagucaaggucuucaccgn

SEQ ID NO: 9425 - RNA, 35 nt, Artificial Sequence
  misc_feature (1)..(4): phosphorothioate linkage
  misc_feature (16)..(16): 2'-deoxy-2'-amino derivative
  misc_feature (27)..(27): 2'-deoxy-2'-amino derivative
  misc_feature (1)..(6): 2'-Omethyl derivative
  misc_feature (8)..(14): 2'-Omethyl derivative
  misc_feature (18)..(18): 2'-Omethyl derivative
  misc_feature (20)..(23): 2'-Omethyl derivative
  misc_feature (26)..(26): 2'-Omethyl derivative
  misc_feature (28)..(34): 2'-Omethyl derivative
  misc_feature (35)..(35): n is an inverted deoxyabasic moiety
uuucuggccgaaaggcgagucaaggucugugaagn

SEQ ID NO: 9426 - RNA, 35 nt, Artificial Sequence
  misc_feature (1)..(4): phosphorothioate linkage
  misc_feature (16)..(16): 2'-deoxy-2'-amino derivative
  misc_feature (27)..(27): 2'-deoxy-2'-amino derivative
  misc_feature (1)..(6): 2'-Omethyl derivative
  misc_feature (8)..(14): 2'-Omethyl derivative
  misc_feature (18)..(18): 2'-Omethyl derivative
  misc_feature (20)..(23): 2'-Omethyl derivative
  misc_feature (26)..(26): 2'-Omethyl derivative
  misc_feature (28)..(34): 2'-Omethyl derivative
  misc_feature (35)..(35): n is an inverted deoxyabasic moiety
cucauagccgaaaggcgagucaaggucuuaacgcn

SEQ ID NO: 9427 - RNA, 37 nt, Artificial Sequence
  misc_feature (1)..(4): phosphorothioate linkage
  misc_feature (17)..(17): 2'-deoxy-2'-amino derivative
  misc_feature (28)..(28): 2'-deoxy-2'-amino derivative
  misc_feature (1)..(7): 2'-Omethyl derivative
  misc_feature (9)..(15): 2'-Omethyl derivative
  misc_feature (19)..(19): 2'-Omethyl derivative
  misc_feature (21)..(24): 2'-Omethyl derivative
  misc_feature (27)..(27): 2'-Omethyl derivative
  misc_feature (29)..(36): 2'-Omethyl derivative
  misc_feature (37)..(37): n is an inverted deoxyabasic moiety
cagaccagccgaaaggcgagucaaggucuuauggcun

SEQ ID NO: 9428 - RNA, 35 nt, Artificial Sequence
  misc_feature (1)..(4): phosphorothioate linkage
  misc_feature (16)..(16): 2'-deoxy-2'-amino derivative
  misc_feature (27)..(27): 2'-deoxy-2'-amino derivative
  misc_feature (1)..(6): 2'-Omethyl derivative
  misc_feature (8)..(14): 2'-Omethyl derivative
  misc_feature (18)..(18): 2'-Omethyl derivative
  misc_feature (20)..(23): 2'-Omethyl derivative
  misc_feature (26)..(26): 2'-Omethyl derivative
  misc_feature (28)..(34): 2'-Omethyl derivative
  misc_feature (35)..(35): n is an inverted deoxyabasic moiety
uacucagccgaaaggcgagucaaggucucgguucn

SEQ ID NO: 9429 - RNA, 37 nt, Artificial Sequence
  misc_feature (1)..(4): phosphorothioate linkage
  misc_feature (17)..(17): 2'-deoxy-2'-amino derivative
  misc_feature (28)..(28): 2'-deoxy-2'-amino derivative
  misc_feature (1)..(7): 2'-Omethyl derivative
  misc_feature (9)..(15): 2'-Omethyl derivative
  misc_feature (19)..(19): 2'-Omethyl derivative
  misc_feature (21)..(24): 2'-Omethyl derivative
  misc_feature (27)..(27): 2'-Omethyl derivative
  misc_feature (29)..(36): 2'-Omethyl derivative
  misc_feature (37)..(37): n is an inverted deoxyabasic moiety
cgguguagccgaaaggcgagucaaggucuucaccggn

SEQ ID NO: 9430 - RNA, 35 nt, Artificial Sequence
  misc_feature (1)..(4): phosphorothioate linkage
  misc_feature (16)..(16): 2'-deoxy-2'-amino derivative
  misc_feature (27)..(27): 2'-deoxy-2'-amino derivative
  misc_feature (1)..(6): 2'-Omethyl derivative
  misc_feature (8)..(14): 2'-Omethyl derivative
  misc_feature (18)..(18): 2'-Omethyl derivative
  misc_feature (20)..(23): 2'-Omethyl derivative
  misc_feature (26)..(26): 2'-Omethyl derivative
  misc_feature (28)..(34): 2'-Omethyl derivative
  misc_feature (35)..(35): n is an inverted deoxyabasic moiety
ggcuaggccgaaaggcgagucaaggucuagucucn

SEQ ID NO: 9431 - RNA, 37 nt, Artificial Sequence
  misc_feature (1)..(4): phosphorothioate linkage
  misc_feature (17)..(17): 2'-deoxy-2'-amino derivative
  misc_feature (28)..(28): 2'-deoxy-2'-amino derivative
  misc_feature (1)..(7): 2'-Omethyl derivative
  misc_feature (9)..(15): 2'-Omethyl derivative
  misc_feature (19)..(19): 2'-Omethyl derivative
  misc_feature (21)..(24): 2'-Omethyl derivative
  misc_feature (27)..(27): 2'-Omethyl derivative
  misc_feature (29)..(36): 2'-Omethyl derivative
  misc_feature (37)..(37): n is an inverted deoxyabasic moiety
cggcuaggccgaaaggcgagucaaggucuagucucgn

SEQ ID NO: 9432 - RNA, 35 nt, Artificial Sequence
  misc_feature (1)..(4): phosphorothioate linkage
  misc_feature (16)..(16): 2'-deoxy-2'-amino derivative
  misc_feature (27)..(27): 2'-deoxy-2'-amino derivative
  misc_feature (1)..(6): 2'-Omethyl derivative
  misc_feature (8)..(14): 2'-Omethyl derivative
  misc_feature (18)..(18): 2'-Omethyl derivative
  misc_feature (20)..(23): 2'-Omethyl derivative
  misc_feature (26)..(26): 2'-Omethyl derivative
  misc_feature (28)..(34): 2'-Omethyl derivative
  misc_feature (35)..(35): n is an inverted deoxyabasic moiety
acaagggccgaaaggcgagucaaggucucuuucgn

SEQ ID NO: 9433 - RNA, 35 nt, Artificial Sequence
  misc_feature (1)..(4): phosphorothioate linkage
  misc_feature (16)..(16): 2'-deoxy-2'-amino derivative
  misc_feature (27)..(27): 2'-deoxy-2'-amino derivative
  misc_feature (1)..(6): 2'-Omethyl derivative
  misc_feature (8)..(14): 2'-Omethyl derivative
  misc_feature (18)..(18): 2'-Omethyl derivative
  misc_feature (20)..(23): 2'-Omethyl derivative
  misc_feature (26)..(26): 2'-Omethyl derivative
  misc_feature (28)..(34): 2'-Omethyl derivative
  misc_feature (35)..(35): n is an inverted deoxyabasic moiety
gcaguagccgaaaggcgagucaaggucucacaagn

SEQ ID NO: 9434 - RNA, 35 nt, Artificial Sequence
  misc_feature (1)..(4): phosphorothioate linkage
  misc_feature (16)..(16): 2'-deoxy-2'-amino derivative
  misc_feature (27)..(27): 2'-deoxy-2'-amino derivative
  misc_feature (1)..(6): 2'-Omethyl derivative
  misc_feature (8)..(14): 2'-Omethyl derivative
  misc_feature (18)..(18): 2'-Omethyl derivative
  misc_feature (20)..(23): 2'-Omethyl derivative
  misc_feature (26)..(26): 2'-Omethyl derivative
  misc_feature (28)..(34): 2'-Omethyl derivative
  misc_feature (35)..(35): n is an inverted deoxyabasic moiety
caagcagccgaaaggcgagucaaggucuccuaucn

SEQ ID NO: 9435 - RNA, 35 nt, Artificial Sequence
  misc_feature (1)..(4): phosphorothioate linkage
  misc_feature (16)..(16): 2'-deoxy-2'-amino derivative
  misc_feature (27)..(27): 2'-deoxy-2'-amino derivative
  misc_feature (1)..(6): 2'-Omethyl derivative
  misc_feature (8)..(14): 2'-Omethyl derivative
  misc_feature (18)..(18): 2'-Omethyl derivative
  misc_feature (20)..(23): 2'-Omethyl derivative
  misc_feature (26)..(26): 2'-Omethyl derivative
  misc_feature (28)..(34): 2'-Omethyl derivative
  misc_feature (35)..(35): n is an inverted deoxyabasic moiety
ggucuagccgaaaggcgagucaaggucugagaccn

SEQ ID NO: 9436 - RNA, 37 nt, Artificial Sequence
  misc_feature (1)..(4): phosphorothioate linkage
  misc_feature (17)..(17): 2'-deoxy-2'-amino derivative
  misc_feature (28)..(28): 2'-deoxy-2'-amino derivative
  misc_feature (1)..(7): 2'-Omethyl derivative
  misc_feature (9)..(15): 2'-Omethyl derivative
  misc_feature (19)..(19): 2'-Omethyl derivative
  misc_feature (21)..(24): 2'-Omethyl derivative
  misc_feature (27)..(27): 2'-Omethyl derivative
  misc_feature (29)..(36): 2'-Omethyl derivative
  misc_feature (37)..(37): n is an inverted deoxyabasic moiety
cggucuagccgaaaggcgagucaaggucugagaccun

SEQ ID NO: 9437 - RNA, 35 nt, Artificial Sequence
  misc_feature (1)..(4): phosphorothioate linkage
  misc_feature (16)..(16): 2'-deoxy-2'-amino derivative
  misc_feature (27)..(27): 2'-deoxy-2'-amino derivative
  misc_feature (1)..(6): 2'-Omethyl derivative
  misc_feature (8)..(14): 2'-Omethyl derivative
  misc_feature (18)..(18): 2'-Omethyl derivative
  misc_feature (20)..(23): 2'-Omethyl derivative
  misc_feature (26)..(26): 2'-Omethyl derivative
  misc_feature (28)..(34): 2'-Omethyl derivative
  misc_feature (35)..(35): n is an inverted deoxyabasic moiety
ggugcagccgaaaggcgagucaaggucuggucuan

SEQ ID NO: 9438 - RNA, 37 nt, Artificial Sequence
  misc_feature (1)..(4): phosphorothioate linkage
  misc_feature (9)..(9): 2'-deoxy-2'-C-allyl derivative
  misc_feature (1)..(8): 2'-Omethyl derivative
  misc_feature (12)..(12): 2'-Omethyl derivative
  misc_feature (14)..(26): 2'-Omethyl derivative
  misc_feature (28)..(29): 2'-Omethyl derivative
  misc_feature (31)..(36): 2'-Omethyl derivative
  misc_feature (37)..(37): n is an inverted deoxyabasic moiety
uuucuuucugaugaggccguuaggccgaaagguuuan

SEQ ID NO: 9439 - RNA, 37 nt, Artificial Sequence
  misc_feature (1)..(4): phosphorothioate linkage
  misc_feature (9)..(9): 2'-deoxy-2'-C-allyl derivative
  misc_feature (1)..(8): 2'-Omethyl derivative
  misc_feature (12)..(12): 2'-Omethyl derivative
  misc_feature (14)..(26): 2'-Omethyl derivative
  misc_feature (28)..(29): 2'-Omethyl derivative
  misc_feature (31)..(36): 2'-Omethyl derivative
  misc_feature (37)..(37): n is an inverted deoxyabasic moiety
uuggugucugaugaggccguuaggccgaaacguuugn

SEQ ID NO: 9440 - RNA, 37 nt, Artificial Sequence
  misc_feature (1)..(4): phosphorothioate linkage
  misc_feature (9)..(9): 2'-deoxy-2'-C-allyl derivative
  misc_feature (1)..(8): 2'-Omethyl derivative
  misc_feature (12)..(12): 2'-Omethyl derivative
  misc_feature (14)..(26): 2'-Omethyl derivative
  misc_feature (28)..(29): 2'-Omethyl derivative
  misc_feature (31)..(36): 2'-Omethyl derivative
  misc_feature (37)..(37): n is an inverted deoxyabasic moiety
ugugggccugaugaggccguuaggccgaaacgguugn

SEQ ID NO: 9441 - RNA, 37 nt, Artificial Sequence
  misc_feature (1)..(4): phosphorothioate linkage
  misc_feature (9)..(9): 2'-deoxy-2'-C-allyl derivative
  misc_feature (1)..(8): 2'-Omethyl derivative
  misc_feature (12)..(12): 2'-Omethyl derivative
  misc_feature (14)..(26): 2'-Omethyl derivative
  misc_feature (28)..(29): 2'-Omethyl derivative
  misc_feature (31)..(36): 2'-Omethyl derivative
  misc_feature (37)..(37): n is an inverted deoxyabasic moiety
agguugucugaugaggccguuaggccgaaaccgcucn

SEQ ID NO: 9442 - RNA, 37 nt, Artificial Sequence
  misc_feature (1)..(4): phosphorothioate linkage
  misc_feature (9)..(9): 2'-deoxy-2'-C-allyl derivative
  misc_feature (1)..(8): 2'-Omethyl derivative
  misc_feature (12)..(12): 2'-Omethyl derivative
  misc_feature (14)..(26): 2'-Omethyl derivative
  misc_feature (28)..(29): 2'-Omethyl derivative
  misc_feature (31)..(36): 2'-Omethyl derivative
  misc_feature (37)..(37): n is an inverted deoxyabasic moiety
uaucgaucugaugaggccguuaggccgaaaccuuacn

SEQ ID NO: 9443 - RNA, 23 nt, Artificial Sequence
  misc_feature (1)..(22): phosphorothioate linkage
  misc_feature (1)..(23): 2'-Omethyl derivative
ugguggcuccaucuuagcccuag

SEQ ID NO: 9444 - RNA, 23 nt, Artificial Sequence
  misc_feature (1)..(22): phosphorothioate linkage
  misc_feature (1)..(23): 2'-Omethyl derivative
gguggcuccaucuuagcccuagu

SEQ ID NO: 9445 - RNA, 23 nt, Artificial Sequence
  misc_feature (1)..(22): phosphorothioate linkage
  misc_feature (1)..(23): 2'-Omethyl derivative
guggcuccaucuuagcccuaguc

SEQ ID NO: 9446 - RNA, 23 nt, Artificial Sequence
  misc_feature (1)..(22): phosphorothioate linkage
  misc_feature (1)..(23): 2'-Omethyl derivative
uggcuccaucuuagcccuaguca

SEQ ID NO: 9447 - RNA, 23 nt, Artificial Sequence
  misc_feature (1)..(22): phosphorothioate linkage
  misc_feature (1)..(23): 2'-Omethyl derivative
ggcuccaucuuagcccuagucac

SEQ ID NO: 9448 - RNA, 23 nt, Artificial Sequence
  misc_feature (1)..(22): phosphorothioate linkage
  misc_feature (1)..(23): 2'-Omethyl derivative
gcuccaucuuagcccuagucacg

SEQ ID NO: 9449 - RNA, 23 nt, Artificial Sequence
  misc_feature (1)..(22): phosphorothioate linkage
  misc_feature (1)..(23): 2'-Omethyl derivative
cuccaucuuagcccuagucacgg

SEQ ID NO: 9450 - RNA, 23 nt, Artificial Sequence
  misc_feature (1)..(22): phosphorothioate linkage
  misc_feature (1)..(23): 2'-Omethyl derivative
uccaucuuagcccuagucacggc

SEQ ID NO: 9451 - RNA, 23 nt, Artificial Sequence
  misc_feature (1)..(22): phosphorothioate linkage
  misc_feature (1)..(23): 2'-Omethyl derivative
ccaucuuagcccuagucacggcu

SEQ ID NO: 9452 - RNA, 23 nt, Artificial Sequence
  misc_feature (1)..(22): phosphorothioate linkage
  misc_feature (1)..(23): 2'-Omethyl derivative
caucuuagcccuagucacggcua

SEQ ID NO: 9453 - RNA, 23 nt, Artificial Sequence
  misc_feature (1)..(22): phosphorothioate linkage
  misc_feature (1)..(23): 2'-Omethyl derivative
aucuuagcccuagucacggcuag

SEQ ID NO: 9454 - RNA, 23 nt, Artificial Sequence
  misc_feature (1)..(22): phosphorothioate linkage
  misc_feature (1)..(23): 2'-Omethyl derivative
ucuuagcccuagucacggcuagc

SEQ ID NO: 9455 - RNA, 23 nt, Artificial Sequence
  misc_feature (1)..(22): phosphorothioate linkage
  misc_feature (1)..(23): 2'-Omethyl derivative
cuuagcccuagucacggcuagcu

SEQ ID NO: 9456 - RNA, 23 nt, Artificial Sequence
  misc_feature (1)..(22): phosphorothioate linkage
  misc_feature (1)..(23): 2'-Omethyl derivative
uuagcccuagucacggcuagcug

SEQ ID NO: 9457 - RNA, 23 nt, Artificial Sequence
  misc_feature (1)..(22): phosphorothioate linkage
  misc_feature (1)..(23): 2'-Omethyl derivative
uagcccuagucacggcuagcugu

SEQ ID NO: 9458 - RNA, 23 nt, Artificial Sequence
  misc_feature (1)..(22): phosphorothioate linkage
  misc_feature (1)..(23): 2'-Omethyl derivative
agcccuagucacggcuagcugug

SEQ ID NO: 9459 - RNA, 23 nt, Artificial Sequence
  misc_feature (1)..(22): phosphorothioate linkage
  misc_feature (1)..(23): 2'-Omethyl derivative
gcccuagucacggcuagcuguga

SEQ ID NO: 9460 - RNA, 23 nt, Artificial Sequence
  misc_feature (1)..(22): phosphorothioate linkage
  misc_feature (1)..(23): 2'-Omethyl derivative
cccuagucacggcuagcugugaa

SEQ ID NO: 9461 - RNA, 23 nt, Artificial Sequence
  misc_feature (1)..(22): phosphorothioate linkage
  misc_feature (1)..(23): 2'-Omethyl derivative
ccuagucacggcuagcugugaaa

SEQ ID NO: 9462 - RNA, 23 nt, Artificial Sequence
  misc_feature (1)..(22): phosphorothioate linkage
  misc_feature (1)..(23): 2'-Omethyl derivative
cuagucacggcuagcugugaaag

SEQ ID NO: 9463 - RNA, 23 nt, Artificial Sequence
  misc_feature (1)..(22): phosphorothioate linkage
  misc_feature (1)..(23): 2'-Omethyl derivative
uagucacggcuagcugugaaagg

SEQ ID NO: 9464 - RNA, 23 nt, Artificial Sequence
  misc_feature (1)..(22): phosphorothioate linkage
  misc_feature (1)..(23): 2'-Omethyl derivative
agucacggcuagcugugaaaggu

SEQ ID NO: 9465 - RNA, 23 nt, Artificial Sequence
  misc_feature (1)..(22): phosphorothioate linkage
  misc_feature (1)..(23): 2'-Omethyl derivative
gucacggcuagcugugaaagguc

SEQ ID NO: 9466 - RNA, 23 nt, Artificial Sequence
  misc_feature (1)..(22): phosphorothioate linkage
  misc_feature (1)..(23): 2'-Omethyl derivative
ucacggcuagcugugaaaggucc

SEQ ID NO: 9467 - RNA, 23 nt, Artificial Sequence
  misc_feature (1)..(22): phosphorothioate linkage
  misc_feature (1)..(23): 2'-Omethyl derivative
cacggcuagcugugaaagguccg

SEQ ID NO: 9468 - RNA, 23 nt, Artificial Sequence
  misc_feature (1)..(22): phosphorothioate linkage
  misc_feature (1)..(23): 2'-Omethyl derivative
acggcuagcugugaaagguccgu

SEQ ID NO: 9469 - RNA, 23 nt, Artificial Sequence
  misc_feature (1)..(22): phosphorothioate linkage
  misc_feature (1)..(23): 2'-Omethyl derivative
cggcuagcugugaaagguccgug

SEQ ID NO: 9470 - RNA, 23 nt, Artificial Sequence
  misc_feature (1)..(22): phosphorothioate linkage
  misc_feature (1)..(23): 2'-Omethyl derivative
ggcuagcugugaaagguccguga

SEQ ID NO: 9471 - RNA, 23 nt, Artificial Sequence
  misc_feature (1)..(22): phosphorothioate linkage
  misc_feature (1)..(23): 2'-Omethyl derivative
gcuagcugugaaagguccgugag

SEQ ID NO: 9472 - RNA, 23 nt, Artificial Sequence
  misc_feature (1)..(22): phosphorothioate linkage
  misc_feature (1)..(23): 2'-Omethyl derivative
cuagcugugaaagguccgugagc

SEQ ID NO: 9473 - RNA, 23 nt, Artificial Sequence
  misc_feature (1)..(22): phosphorothioate linkage
  misc_feature (1)..(23): 2'-Omethyl derivative
gcaugacugcagagagugcugau

SEQ ID NO: 9474 - RNA, 23 nt, Artificial Sequence
  misc_feature (1)..(22): phosphorothioate linkage
  misc_feature (1)..(23): 2'-Omethyl derivative
caugacugcagagagugcugaua

SEQ ID NO: 9475 - RNA, 23 nt, Artificial Sequence
  misc_feature (1)..(22): phosphorothioate linkage
  misc_feature (1)..(23): 2'-Omethyl derivative
augacugcagagagugcugauac

SEQ ID NO: 9476 - RNA, 23 nt, Artificial Sequence
  misc_feature (1)..(22): phosphorothioate linkage
  misc_feature (1)..(23): 2'-Omethyl derivative
ugacugcagagagugcugauacu

SEQ ID NO: 9477 - RNA, 23 nt, Artificial Sequence
  misc_feature (1)..(22): phosphorothioate linkage
  misc_feature (1)..(23): 2'-Omethyl derivative
gacugcagagagugcugauacug

SEQ ID NO: 9478 - RNA, 23 nt, Artificial Sequence
  misc_feature (1)..(22): phosphorothioate linkage
  misc_feature (1)..(23): 2'-Omethyl derivative
acugcagagagugcugauacugg

SEQ ID NO: 9479 - RNA, 23 nt, Artificial Sequence
  misc_feature (1)..(22): phosphorothioate linkage
  misc_feature (1)..(23): 2'-Omethyl derivative
cugcagagagugcugauacuggc

SEQ ID NO: 9480 - RNA, 23 nt, Artificial Sequence
  misc_feature (1)..(22): phosphorothioate linkage
  misc_feature (1)..(23): 2'-Omethyl derivative
ugcagagagugcugauacuggcc

SEQ ID NO: 9481 - RNA, 23 nt, Artificial Sequence
  misc_feature (1)..(22): phosphorothioate linkage
  misc_feature (1)..(23): 2'-Omethyl derivative
gcagagagugcugauacuggccu

SEQ ID NO: 9482 - RNA, 23 nt, Artificial Sequence
  misc_feature (1)..(22): phosphorothioate linkage
  misc_feature (1)..(23): 2'-Omethyl derivative
cagagagugcugauacuggccuc

SEQ ID NO: 9483 - RNA, 23 nt, Artificial Sequence
  misc_feature (1)..(22): phosphorothioate linkage
  misc_feature (1)..(23): 2'-Omethyl derivative
agagagugcugauacuggccucu

SEQ ID NO: 9484 - RNA, 23 nt, Artificial Sequence
  misc_feature (1)..(22): phosphorothioate linkage
  misc_feature (1)..(23): 2'-Omethyl derivative
gagagugcugauacuggccucuc

SEQ ID NO: 9485 - RNA, 35 nt, Artificial Sequence
  misc_feature (1)..(4): phosphorothioate linkage
  misc_feature (29)..(29): n is inosine
  misc_feature (8)..(8): 2'-deoxy-2'-C-allyl derivative
  misc_feature (35)..(35): n is an inverted deoxyabasic moiety
  misc_feature (1)..(7): 2'-Omethyl derivative
  misc_feature (11)..(11): 2'-Omethyl derivative
  misc_feature (13)..(25): 2'-Omethyl derivative
  misc_feature (27)..(28): 2'-Omethyl derivative
  misc_feature (30)..(34): 2'-Omethyl derivative
cucacccugaugaggccguuaggccgaanuuccgn

SEQ ID NO: 9486 - RNA, 35 nt, Artificial Sequence
  misc_feature (1)..(4): phosphorothioate linkage
  misc_feature (29)..(29): n is inosine
  misc_feature (8)..(8): 2'-deoxy-2'-C-allyl derivative
  misc_feature (1)..(7): 2'-Omethyl derivative
  misc_feature (11)..(11): 2'-Omethyl derivative
  misc_feature (13)..(25): 2'-Omethyl derivative
  misc_feature (27)..(28): 2'-Omethyl derivative
  misc_feature (30)..(34): 2'-Omethyl derivative
  misc_feature (35)..(35): n is an inverted deoxyabasic moiety
uuccggcugaugaggccguuaggccgaanuacucn

SEQ ID NO: 9487 - RNA, 35 nt, Artificial Sequence
  misc_feature (1)..(4): phosphorothioate linkage
  misc_feature (29)..(29): n is inosine
  misc_feature (8)..(8): 2'-deoxy-2'-C-allyl derivative
  misc_feature (1)..(7): 2'-Omethyl derivative
  misc_feature (11)..(11): 2'-Omethyl derivative
  misc_feature (13)..(25): 2'-Omethyl derivative
  misc_feature (27)..(28): 2'-Omethyl derivative
  misc_feature (30)..(34): 2'-Omethyl derivative
  misc_feature (35)..(35): n is an inverted deoxyabasic moiety
cacuaucugaugaggccguuaggccgaancucucn

SEQ ID NO: 9488 - RNA, 35 nt, Artificial Sequence
  misc_feature (1)..(4): phosphorothioate linkage
  misc_feature (29)..(29): n is inosine
  misc_feature (8)..(8): 2'-deoxy-2'-C-allyl derivative
  misc_feature (1)..(7): 2'-Omethyl derivative
  misc_feature (11)..(11): 2'-Omethyl derivative
  misc_feature (13)..(25): 2'-Omethyl derivative
  misc_feature (27)..(28): 2'-Omethyl derivative
  misc_feature (30)..(34): 2'-Omethyl derivative
  misc_feature (35)..(35): n is an inverted deoxyabasic moiety
ccacuacugaugaggccguuaggccgaangcucun

SEQ ID NO: 9489 - RNA, 35 nt, Artificial Sequence
  misc_feature (1)..(4): phosphorothioate linkage
  misc_feature (29)..(29): n is inosine
  misc_feature (8)..(8): 2'-deoxy-2'-C-allyl derivative
  misc_feature (1)..(7): 2'-Omethyl derivative
  misc_feature (11)..(11): 2'-Omethyl derivative
  misc_feature (13)..(25): 2'-Omethyl derivative
  misc_feature (27)..(28): 2'-Omethyl derivative
  misc_feature (30)..(34): 2'-Omethyl derivative
  misc_feature (35)..(5): n is an inverted deoxyabasic moiety
accacacugaugaggccguuaggccgaangccuun

SEQ ID NO: 9490 - RNA, 35 nt, Artificial Sequence
  misc_feature (1)..(4): phosphorothioate linkage
  misc_feature (29)..(29): n is inosine
  misc_feature (8)..(8): 2'-deoxy-2'-C-allyl derivative
  misc_feature (1)..(7): 2'-Omethyl derivative
  misc_feature (11)..(11): 2'-Omethyl derivative
  misc_feature (13)..(25): 2'-Omethyl derivative
  misc_feature (27)..(28): 2'-Omethyl derivative
  misc_feature (30)..(34): 2'-Omethyl derivative
  misc_feature (35)..(35): n is an inverted deoxyabasic moiety
ucuccccugaugaggccguuaggccgaangagggn

SEQ ID NO: 9491 - RNA, 35 nt, Artificial Sequence
  misc_feature (1)..(4): phosphorothioate linkage
  misc_feature (29)..(29): n is inosine
  misc_feature (8)..(8): 2'-deoxy-2'-C-allyl derivative
  misc_feature (1)..(7): 2'-Omethyl derivative
  misc_feature (11)..(11): 2'-Omethyl derivative
  misc_feature (13)..(25): 2'-Omethyl derivative
  misc_feature (27)..(28): 2'-Omethyl derivative
  misc_feature (30)..(34): 2'-Omethyl derivative
  misc_feature (35)..(35): n is an inverted deoxyabasic moiety
ccacaacugaugaggccguuaggccgaanccuuun

SEQ ID NO: 9492 - RNA, 35 nt, Artificial Sequence
  misc_feature (1)..(4): phosphorothioate linkage
  misc_feature (29)..(29): n is inosine
  misc_feature (8)..(8): 2'-deoxy-2'-C-allyl derivative
  misc_feature (1)..(7): 2'-Omethyl derivative
  misc_feature (11)..(11): 2'-Omethyl derivative
  misc_feature (13)..(25): 2'-Omethyl derivative
  misc_feature (27)..(28): 2'-Omethyl derivative
  misc_feature (30)..(34): 2'-Omethyl derivative
  misc_feature (35)..(35): n is an inverted deoxyabasic moiety
uuccgccugaugaggccguuaggccgaanaccacn

SEQ ID NO: 9493 - RNA, 35 nt, Artificial Sequence
  misc_feature (1)..(4): phosphorothioate linkage
  misc_feature (29)..(29): n is inosine
  misc_feature (8)..(8): 2'-deoxy-2'-C-allyl derivative
  misc_feature (1)..(7): 2'-Omethyl derivative
  misc_feature (11)..(11): 2'-Omethyl derivative
  misc_feature (13)..(25): 2'-Omethyl derivative
  misc_feature (27)..(28): 2'-Omethyl derivative
  misc_feature (30)..(34): 2'-Omethyl derivative
  misc_feature (35)..(35): n is an inverted deoxyabasic moiety
caagaacugaugaggccguuaggccgaangacccn

SEQ ID NO: 9494 - RNA, 35 nt, Artificial Sequence
  misc_feature (1)..(22): phosphorothioate linkage
  misc_feature (8)..(8): 2'-deoxy-2'-C-allyl derivative
  misc_feature (1)..(7): 2'-Omethyl derivative
  misc_feature (11)..(11): 2'-Omethyl derivative
  misc_feature (13)..(25): 2'-Omethyl derivative
  misc_feature (27)..(28): 2'-Omethyl derivative
  misc_feature (30)..(34): 2'-Omethyl derivative
  misc_feature (35)..(35): n is an inverted deoxyabasic moiety
cuacuccugaugaggccguuaggccgaancuagcn

SEQ ID NO: 9495 - RNA, 35 nt, Artificial Sequence
  misc_feature (1)..(22): phosphorothioate linkage
  misc_feature (29)..(29): n is inosine
  misc_feature (8)..(8): 2'-deoxy-2'-C-allyl derivative
  misc_feature (1)..(7): 2'-Omethyl derivative
  misc_feature (11)..(11): 2'-Omethyl derivative
  misc_feature (13)..(25): 2'-Omethyl derivative
  misc_feature (27)..(28): 2'-Omethyl derivative
  misc_feature (30)..(34): 2'-Omethyl derivative
  misc_feature (35)..(35): n is an inverted deoxyabasic moiety
ccuauccugaugaggccguuaggccgaangcagun

SEQ ID NO: 9496 - RNA, 35 nt, Artificial Sequence
  misc_feature (1)..(4): phosphorothioate linkage
  misc_feature (29)..(29): n is inosine
  misc_feature (8)..(8): 2'-deoxy-2'-C-allyl derivative
  misc_feature (1)..(7): 2'-Omethyl derivative
  misc_feature (11)..(11): 2'-Omethyl derivative
  misc_feature (13)..(25): 2'-Omethyl derivative
  misc_feature (27)..(28): 2'-Omethyl derivative
  misc_feature (30)..(34): 2'-Omethyl derivative
  misc_feature (35)..(35): n is an inverted deoxyabasic moiety
cuaucacugaugaggccguuaggccgaancaguan

SEQ ID NO: 9497 - RNA, 35 nt, Artificial Sequence
  misc_feature (1)..(4): phosphorothioate linkage
  misc_feature (29)..(29): n is inosine
  misc_feature (8)..(8): 2'-deoxy-2'-C-allyl derivative
  misc_feature (1)..(7): 2'-Omethyl derivative
  misc_feature (11)..(11): 2'-Omethyl derivative
  misc_feature (13)..(25): 2'-Omethyl derivative
  misc_feature (27)..(28): 2'-Omethyl derivative
  misc_feature (30)..(34): 2'-Omethyl derivative
  misc_feature (35)..(35): n is an inverted deoxyabasic moiety
ucaggccugaugaggccguuaggccgaanuaccan

SEQ ID NO: 9498 - RNA, 35 nt, Artificial Sequence
  misc_feature (1)..(4): phosphorothioate linkage
  misc_feature (29)..(29): n is inosine
  misc_feature (8)..(8): 2'-deoxy-2'-C-allyl derivative
  misc_feature (1)..(7): 2'-Omethyl derivative
  misc_feature (11)..(11): 2'-Omethyl derivative
  misc_feature (13)..(25): 2'-Omethyl derivative
  misc_feature (27)..(28): 2'-Omethyl derivative
  misc_feature (30)..(34): 2'-Omethyl derivative
  misc_feature (35)..(35): n is an inverted deoxyabasic moiety
aauucccugaugaggccguuaggccgaanuguacn

SEQ ID NO: 9499 - RNA, 37 nt, Artificial Sequence
  misc_feature (1)..(4): phosphorothioate linkage
  misc_feature (30)..(30): n is inosine
  misc_feature (9)..(9): 2'-deoxy-2'-C-allyl derivative
  misc_feature (1)..(8): 2'-Omethyl derivative
  misc_feature (12)..(12): 2'-Omethyl derivative
  misc_feature (14)..(26): 2'-Omethyl derivative
  misc_feature (28)..(29): 2'-Omethyl derivative
  misc_feature (31)..(36): 2'-Omethyl derivative
  misc_feature (37)..(37): n is an inverted deoxyabasic moiety
ccuaucacugaugaggccguuaggccgaancaguacn

SEQ ID NO: 9500 - RNA, 37 nt, Artificial Sequence
  misc_feature (1)..(4): phosphorothioate linkage
  misc_feature (30)..(30): n is inosine
  misc_feature (9)..(9): 2'-deoxy-2'-C-allyl derivative
  misc_feature (1)..(8): 2'-Omethyl derivative
  misc_feature (12)..(12): 2'-Omethyl derivative
  misc_feature (14)..(26): 2'-Omethyl derivative
  misc_feature (28)..(29): 2'-Omethyl derivative
  misc_feature (31)..(36): 2'-Omethyl derivative
  misc_feature (37)..(37): n is an inverted deoxyabasic moiety
cccuauccugaugaggccguuaggccgaangcaguan

SEQ ID NO: 9501 - RNA, 37 nt, Artificial Sequence
  misc_feature (1)..(4): phosphorothioate linkage
  misc_feature (30)..(30): n is inosine
  misc_feature (9)..(9): 2'-deoxy-2'-C-allyl derivative
  misc_feature (1)..(8): 2'-Omethyl derivative
  misc_feature (12)..(12): 2'-Omethyl derivative
  misc_feature (14)..(26): 2'-Omethyl derivative
  misc_feature (28)..(29): 2'-Omethyl derivative
  misc_feature (31)..(36): 2'-Omethyl derivative
  misc_feature (37)..(37): n is an inverted deoxyabasic moiety
uaccacacugaugaggccguuaggccgaangccuuun

SEQ ID NO: 9502 - RNA, 35 nt, Artificial Sequence
  misc_feature (1)..(4): phosphorothioate linkage
  misc_feature (8)..(8): 2'-deoxy-2'-amino derivative
  misc_feature (11)..(11): 2'-deoxy-2'-amino derivative
  misc_feature (29)..(29): 2'-deoxy-2'-amino derivative
  misc_feature (1)..(7): 2'-Omethyl derivative
  misc_feature (13)..(25): 2'-Omethyl derivative
  misc_feature (27)..(28): 2'-Omethyl derivative
  misc_feature (30)..(34): 2'-Omethyl derivative
  misc_feature (35)..(35): n is an inverted deoxyabasic moiety
uccggucugaugaggccguuaggccgaauacucan

SEQ ID NO: 9503 - RNA, 35 nt, Artificial Sequence
  misc_feature (1)..(4): phosphorothioate linkage
  misc_feature (8)..(8): 2'-deoxy-2'-amino derivative
  misc_feature (11)..(11): 2'-deoxy-2'-amino derivative
  misc_feature (29)..(29): 2'-deoxy-2'-amino derivative
  misc_feature (1)..(7): 2'-Omethyl derivative
  misc_feature (13)..(25): 2'-Omethyl derivative
  misc_feature (27)..(28): 2'-Omethyl derivative
  misc_feature (30)..(34): 2'-Omethyl derivative
  misc_feature (35)..(35): n is an inverted deoxyabasic moiety
auuccgcugaugaggccguuaggccgaauguacun

SEQ ID NO: 9504 - RNA, 35 nt, Artificial Sequence
  misc_feature (1)..(4): phosphorothioate linkage
  misc_feature (8)..(8): 2'-deoxy-2'-amino derivative
  misc_feature (11)..(11): 2'-deoxy-2'-amino derivative
  misc_feature (29)..(29): 2'-deoxy-2'-amino derivative
  misc_feature (1)..(7): 2'-Omethyl derivative
  misc_feature (13)..(25): 2'-Omethyl derivative
  misc_feature (27)..(28): 2'-Omethyl derivative
  misc_feature (30)..(34): 2'-Omethyl derivative
  misc_feature (35)..(35): n is an inverted deoxyabasic moiety
accacucugaugaggccguuaggccgaauggcucn

SEQ ID NO: 9505 - RNA, 35 nt, Artificial Sequence
  misc_feature (1)..(4): phosphorothioate linkage
  misc_feature (8)..(8): 2'-deoxy-2'-amino derivative
  misc_feature (11)..(11): 2'-deoxy-2'-amino derivative
  misc_feature (29)..(29): 2'-deoxy-2'-amino derivative
  misc_feature (1)..(7): 2'-Omethyl derivative
  misc_feature (13)..(25): 2'-Omethyl derivative
  misc_feature (27)..(28): 2'-Omethyl derivative
  misc_feature (30)..(34): 2'-Omethyl derivative
  misc_feature (35)..(35): n is an inverted deoxyabasic moiety
ucaccgcugaugaggccguuaggccgaauuccgcn

SEQ ID NO: 9506 - RNA, 35 nt, Artificial Sequence
  misc_feature (1)..(4): phosphorothioate linkage
  misc_feature (8)..(8): 2'-deoxy-2'-amino derivative
  misc_feature (11)..(11): 2'-deoxy-2'-amino derivative
  misc_feature (29)..(29): 2'-deoxy-2'-amino derivative
  misc_feature (1)..(7): 2'-Omethyl derivative
  misc_feature (13)..(25): 2'-Omethyl derivative
  misc_feature (27)..(28): 2'-Omethyl derivative
  misc_feature (30)..(34): 2'-Omethyl derivative
  misc_feature (35)..(35): n is an inverted deoxyabasic moiety
caccggcugaugaggccguuaggccgaauccgcan

SEQ ID NO: 9507 - RNA, 35 nt, Artificial Sequence
  misc_feature (1)..(4): phosphorothioate linkage
  misc_feature (8)..(8): 2'-deoxy-2'-amino derivative
  misc_feature (11)..(11): 2'-deoxy-2'-amino derivative
  misc_feature (29)..(29): 2'-deoxy-2'-amino derivative
  misc_feature (1)..(7): 2'-Omethyl derivative
  misc_feature (13)..(25): 2'-Omethyl derivative
  misc_feature (27)..(28): 2'-Omethyl derivative
  misc_feature (30)..(34): 2'-Omethyl derivative
  misc_feature (35)..(35): n is an inverted deoxyabasic moiety
caggcacugaugaggccguuaggccgaauaccacn

SEQ ID NO: 9508 - RNA, 35 nt, Artificial Sequence
  misc_feature (1)..(4): phosphorothioate linkage
  misc_feature (8)..(8): 2'-deoxy-2'-amino derivative
  misc_feature (11)..(11): 2'-deoxy-2'-amino derivative
  misc_feature (29)..(29): 2'-deoxy-2'-amino derivative
  misc_feature (1)..(7): 2'-Omethyl derivative
  misc_feature (13)..(25): 2'-Omethyl derivative
  misc_feature (27)..(28): 2'-Omethyl derivative
  misc_feature (30)..(34): 2'-Omethyl derivative
  misc_feature (35)..(35): n is an inverted deoxyabasic moiety
cacccucugaugaggccguuaggccgaaucaggcn

SEQ ID NO: 9509 - RNA, 37 nt, Artificial Sequence
  misc_feature (1)..(4): phosphorothioate linkage
  misc_feature (9)..(9): 2'-deoxy-2'-amino derivative
  misc_feature (12)..(12): 2'-deoxy-2'-amino derivative
  misc_feature (30)..(30): 2'-deoxy-2'-amino derivative
  misc_feature (1)..(8): 2'-Omethyl derivative
  misc_feature (14)..(26): 2'-Omethyl derivative
  misc_feature (28)..(29): 2'-Omethyl derivative
  misc_feature (31)..(36): 2'-Omethyl derivative
  misc_feature (37)..(37): n is an inverted deoxyabasic moiety
uuccggucugaugaggccguuaggccgaauacucacn

SEQ ID NO: 9510 - RNA, 37 nt, Artificial Sequence
  misc_feature (1)..(4): phosphorothioate linkage
  misc_feature (9)..(9): 2'-deoxy-2'-amino derivative
  misc_feature (12)..(12): 2'-deoxy-2'-amino derivative
  misc_feature (30)..(30): 2'-deoxy-2'-amino derivative
  misc_feature (1)..(8): 2'-Omethyl derivative
  misc_feature (14)..(26): 2'-Omethyl derivative
  misc_feature (28)..(29): 2'-Omethyl derivative
  misc_feature (31)..(36): 2'-Omethyl derivative
  misc_feature (37)..(37): n is an inverted deoxyabasic moiety
gaccacucugaugaggccguuaggccgaauggcucun

SEQ ID NO: 9511 - RNA, 37 nt, Artificial Sequence
  misc_feature (1)..(4): phosphorothioate linkage
  misc_feature (9)..(9): 2'-deoxy-2'-amino derivative
  misc_feature (12)..(12): 2'-deoxy-2'-amino derivative
  misc_feature (30)..(30): 2'-deoxy-2'-amino derivative
  misc_feature (1)..(8): 2'-Omethyl derivative
  misc_feature (14)..(26): 2'-Omethyl derivative
  misc_feature (28)..(29): 2'-Omethyl derivative
  misc_feature (31)..(36): 2'-Omethyl derivative
  misc_feature (37)..(37): n is an inverted deoxyabasic moiety
cucaccgcugaugaggccguuaggccgaauuccgcan

SEQ ID NO: 9512 - RNA, 37 nt, Artificial Sequence
  misc_feature (1)..(4): phosphorothioate linkage
  misc_feature (9)..(9): 2'-deoxy-2'-amino derivative
  misc_feature (12)..(12): 2'-deoxy-2'-amino derivative
  misc_feature (30)..(30): 2'-deoxy-2'-amino derivative
  misc_feature (1)..(8): 2'-Omethyl derivative
  misc_feature (14)..(26): 2'-Omethyl derivative
  misc_feature (28)..(29): 2'-Omethyl derivative
  misc_feature (31)..(36): 2'-Omethyl derivative
  misc_feature (37)..(37): n is an inverted deoxyabasic moiety
ucaccggcugaugaggccguuaggccgaauccgcagn

SEQ ID NO: 9513 - RNA, 37 nt, Artificial Sequence
  misc_feature (1)..(4): phosphorothioate linkage
  misc_feature (9)..(9): 2'-deoxy-2'-amino derivative
  misc_feature (12)..(12): 2'-deoxy-2'-amino derivative
  misc_feature (30)..(30): 2'-deoxy-2'-amino derivative
  misc_feature (1)..(8): 2'-Omethyl derivative
  misc_feature (14)..(26): 2'-Omethyl derivative
  misc_feature (28)..(29): 2'-Omethyl derivative
  misc_feature (31)..(36): 2'-Omethyl derivative
  misc_feature (37)..(37): n is an inverted deoxyabasic moiety
ucaggcacugaugaggccguuaggccgaauaccacan

SEQ ID NO: 9514 - RNA, 37 nt, Artificial Sequence
  misc_feature (1)..(4): phosphorothioate linkage
  misc_feature (9)..(9): 2'-deoxy-2'-amino derivative
  misc_feature (12)..(12): 2'-deoxy-2'-amino derivative
  misc_feature (30)..(30): 2'-deoxy-2'-amino derivative
  misc_feature (1)..(8): 2'-Omethyl derivative
  misc_feature (14)..(26): 2'-Omethyl derivative
  misc_feature (28)..(29): 2'-Omethyl derivative
  misc_feature (31)..(36): 2'-Omethyl derivative
  misc_feature (37)..(37): n is an inverted deoxyabasic moiety
gcacccucugaugaggccguuaggccgaaucaggcan

SEQ ID NO: 9515 - RNA, 37 nt, Artificial Sequence
  misc_feature (1)..(4): phosphorothioate linkage
  misc_feature (9)..(9): 2'-deoxy-2'-amino derivative
  misc_feature (12)..(12): 2'-deoxy-2'-amino derivative
  misc_feature (30)..(30): 2'-deoxy-2'-amino derivative
  misc_feature (1)..(8): 2'-Omethyl derivative
  misc_feature (14)..(26): 2'-Omethyl derivative
  misc_feature (28)..(29): 2'-Omethyl derivative
  misc_feature (31)..(36): 2'-Omethyl derivative
  misc_feature (37)..(37): n is an inverted deoxyabasic moiety
aauuccgcugaugaggccguuaggccgaauguacucn

SEQ ID NO: 9516 - RNA, 34 nt, Artificial Sequence
  misc_feature (1)..(4): phosphorothioate linkage
  misc_feature (16)..(16): 2'-deoxy-2'-amino derivative
  misc_feature (26)..(26): 2'-deoxy-2'-amino derivative
  misc_feature (1)..(15): 2'-Omethyl derivative
  misc_feature (17)..(22): 2'-Omethyl derivative
  misc_feature (24)..(25): 2'-Omethyl derivative
  misc_feature (27)..(33): 2'-Omethyl derivative
  misc_feature (34)..(34): n is an inverted deoxyabasic moiety
ugaguagccgaaaggcgagugaggucuaccggan

SEQ ID NO: 9517 - RNA, 34 nt, Artificial Sequence
  misc_feature (1)..(4): phosphorothioate linkage
  misc_feature (16)..(16): 2'-deoxy-2'-amino derivative
  misc_feature (26)..(26): 2'-deoxy-2'-amino derivative
  misc_feature (1)..(15): 2'-Omethyl derivative
  misc_feature (17)..(22): 2'-Omethyl derivative
  misc_feature (24)..(25): 2'-Omethyl derivative
  misc_feature (27)..(33): 2'-Omethyl derivative
  misc_feature (34)..(34): n is an inverted deoxyabasic moiety
aguacagccgaaaggcgagugaggucucggaaun

SEQ ID NO: 9518 - RNA, 34 nt, Artificial Sequence
  misc_feature (1)..(4): phosphorothioate linkage
  misc_feature (16)..(16): 2'-deoxy-2'-amino derivative
  misc_feature (26)..(26): 2'-deoxy-2'-amino derivative
  misc_feature (1)..(15): 2'-Omethyl derivative
  misc_feature (17)..(22): 2'-Omethyl derivative
  misc_feature (24)..(25): 2'-Omethyl derivative
  misc_feature (27)..(33): 2'-Omethyl derivative
  misc_feature (34)..(34): n is an inverted deoxyabasic moiety
ggagaggccgaaaggcgagugaggucucauagun

SEQ ID NO: 9519 - RNA, 34 nt, Artificial Sequence
  misc_feature (1)..(4): phosphorothioate linkage
  misc_feature (16)..(16): 2'-deoxy-2'-amino derivative
  misc_feature (26)..(26): 2'-deoxy-2'-amino derivative
  misc_feature (1)..(15): 2'-Omethyl derivative
  misc_feature (17)..(22): 2'-Omethyl derivative
  misc_feature (24)..(25): 2'-Omethyl derivative
  misc_feature (27)..(33): 2'-Omethyl derivative
  misc_feature (34)..(34): n is an inverted deoxyabasic moiety
gcggaagccgaaaggcgagugaggucucggugan

SEQ ID NO: 9520 - RNA, 34 nt, Artificial Sequence
  misc_feature (1)..(4): phosphorothioate linkage
  misc_feature (16)..(16): 2'-deoxy-2'-amino derivative
  misc_feature (26)..(26): 2'-deoxy-2'-amino derivative
  misc_feature (1)..(15): 2'-Omethyl derivative
  misc_feature (17)..(22): 2'-Omethyl derivative
  misc_feature (24)..(25): 2'-Omethyl derivative
  misc_feature (27)..(33): 2'-Omethyl derivative
  misc_feature (34)..(34): n is an inverted deoxyabasic moiety
ggcguggccgaaaggcgagugaggucuccccgcn

SEQ ID NO: 9521 - RNA, 34 nt, Artificial Sequence
  misc_feature (1)..(4): phosphorothioate linkage
  misc_feature (16)..(16): 2'-deoxy-2'-amino derivative
  misc_feature (26)..(26): 2'-deoxy-2'-amino derivative
  misc_feature (1)..(15): 2'-Omethyl derivative
  misc_feature (17)..(22): 2'-Omethyl derivative
  misc_feature (24)..(25): 2'-Omethyl derivative
  misc_feature (27)..(33): 2'-Omethyl derivative
  misc_feature (34)..(34): n is an inverted deoxyabasic moiety
gaaagggccgaaaggcgagugaggucucuugugn

SEQ ID NO: 9522 - RNA, 34 nt, Artificial Sequence
  misc_feature (1)..(4): phosphorothioate linkage
  misc_feature (16)..(16): 2'-deoxy-2'-amino derivative
  misc_feature (26)..(26): 2'-deoxy-2'-amino derivative
  misc_feature (1)..(15): 2'-Omethyl derivative
  misc_feature (17)..(22): 2'-Omethyl derivative
  misc_feature (24)..(25): 2'-Omethyl derivative
  misc_feature (27)..(33): 2'-Omethyl derivative
  misc_feature (34)..(34): n is an inverted deoxyabasic moiety
ggucuggccgaaaggcgagugaggucuggaaccn

SEQ ID NO: 9523 - RNA, 34 nt, Artificial Sequence
  misc_feature (1)..(4): phosphorothioate linkage
  misc_feature (16)..(16): 2'-deoxy-2'-amino derivative
  misc_feature (26)..(26): 2'-deoxy-2'-amino derivative
  misc_feature (1)..(15): 2'-Omethyl derivative
  misc_feature (17)..(22): 2'-Omethyl derivative
  misc_feature (24)..(25): 2'-Omethyl derivative
  misc_feature (27)..(33): 2'-Omethyl derivative
  misc_feature (34)..(34): n is an inverted deoxyabasic moiety
guacuggccgaaaggcgagugaggucucugauan

SEQ ID NO: 9524 - RNA, 34 nt, Artificial Sequence
  misc_feature (1)..(4): phosphorothioate linkage
  misc_feature (16)..(16): 2'-deoxy-2'-amino derivative
  misc_feature (26)..(26): 2'-deoxy-2'-amino derivative
  misc_feature (1)..(15): 2'-Omethyl derivative
  misc_feature (17)..(22): 2'-Omethyl derivative
  misc_feature (24)..(25): 2'-Omethyl derivative
  misc_feature (27)..(33): 2'-Omethyl derivative
  misc_feature (34)..(34): n is an inverted deoxyabasic moiety
gugguagccgaaaggcgagugaggucuugccugn

SEQ ID NO: 9525 - RNA, 36 nt, Artificial Sequence
  misc_feature (1)..(4): phosphorothioate linkage
  misc_feature (17)..(17): 2'-deoxy-2'-amino derivative
  misc_feature (27)..(27): 2'-deoxy-2'-amino derivative
  misc_feature (1)..(16): 2'-Omethyl derivative
  misc_feature (18)..(23): 2'-Omethyl derivative
  misc_feature (25)..(26): 2'-Omethyl derivative
  misc_feature (28)..(35): 2'-Omethyl derivative
  misc_feature (36)..(36): n is an inverted deoxyabasic moiety
gugaguagccgaaaggcgagugaggucuaccggaan

SEQ ID NO: 9526 - RNA, 36 nt, Artificial Sequence
  misc_feature (1)..(4): phosphorothioate linkage
  misc_feature (17)..(17): 2'-deoxy-2'-amino derivative
  misc_feature (27)..(27): 2'-deoxy-2'-amino derivative
  misc_feature (1)..(16): 2'-Omethyl derivative
  misc_feature (18)..(23): 2'-Omethyl derivative
  misc_feature (25)..(26): 2'-Omethyl derivative
  misc_feature (28)..(35): 2'-Omethyl derivative
  misc_feature (36)..(36): n is an inverted deoxyabasic moiety
cgaaagggccgaaaggcgagugaggucucuuguggn

SEQ ID NO: 9527 - RNA, 36 nt, Artificial Sequence
  misc_feature (1)..(4): phosphorothioate linkage
  misc_feature (17)..(17): 2'-deoxy-2'-amino derivative
  misc_feature (27)..(27): 2'-deoxy-2'-amino derivative
  misc_feature (1)..(16): 2'-Omethyl derivative
  misc_feature (18)..(23): 2'-Omethyl derivative
  misc_feature (25)..(26): 2'-Omethyl derivative
  misc_feature (28)..(35): 2'-Omethyl derivative
  misc_feature (36)..(36): n is an inverted deoxyabasic moiety
ugcggaagccgaaaggcgagugaggucucggugagn

SEQ ID NO: 9528 - RNA, 36 nt, Artificial Sequence
  misc_feature (1)..(4): phosphorothioate linkage
  misc_feature (17)..(17): 2'-deoxy-2'-amino derivative
  misc_feature (27)..(27): 2'-deoxy-2'-amino derivative
  misc_feature (1)..(16): 2'-Omethyl derivative
  misc_feature (18)..(23): 2'-Omethyl derivative
  misc_feature (25)..(26): 2'-Omethyl derivative
  misc_feature (28)..(35): 2'-Omethyl derivative
  misc_feature (36)..(36): n is an inverted deoxyabasic moiety
gggagaggccgaaaggcgagugaggucucauagugn

SEQ ID NO: 9529 - RNA, 36 nt, Artificial Sequence
  misc_feature (1)..(4): phosphorothioate linkage
  misc_feature (17)..(17): 2'-deoxy-2'-amino derivative
  misc_feature (27)..(27): 2'-deoxy-2'-amino derivative
  misc_feature (1)..(16): 2'-Omethyl derivative
  misc_feature (18)..(23): 2'-Omethyl derivative
  misc_feature (25)..(26): 2'-Omethyl derivative
  misc_feature (28)..(35): 2'-Omethyl derivative
  misc_feature (36)..(36): n is an inverted deoxyabasic moiety
uggucuggccgaaaggcgagugaggucuggaaccgn

SEQ ID NO: 9530 - RNA, 36 nt, Artificial Sequence
  misc_feature (1)..(4): phosphorothioate linkage
  misc_feature (17)..(17): 2'-deoxy-2'-amino derivative
  misc_feature (27)..(27): 2'-deoxy-2'-amino derivative
  misc_feature (1)..(16): 2'-Omethyl derivative
  misc_feature (18)..(23): 2'-Omethyl derivative
  misc_feature (25)..(26): 2'-Omethyl derivative
  misc_feature (28)..(35): 2'-Omethyl derivative
  misc_feature (36)..(36): n is an inverted deoxyabasic moiety
gguacuggccgaaaggcgagugaggucucugauagn

SEQ ID NO: 9531 - RNA, 36 nt, Artificial Sequence
  misc_feature (1)..(4): phosphorothioate linkage
  misc_feature (17)..(17): 2'-deoxy-2'-amino derivative
  misc_feature (27)..(27): 2'-deoxy-2'-amino derivative
  misc_feature (1)..(16): 2'-Omethyl derivative
  misc_feature (18)..(23): 2'-Omethyl derivative
  misc_feature (25)..(26): 2'-Omethyl derivative
  misc_feature (28)..(35): 2'-Omethyl derivative
  misc_feature (36)..(36): n is an inverted deoxyabasic moiety
ugugguagccgaaaggcgagugaggucuugccugan

SEQ ID NO: 9532 - RNA, 36 nt, Artificial Sequence
  misc_feature (1)..(4): phosphorothioate linkage
  misc_feature (17)..(17): 2'-deoxy-2'-amino derivative
  misc_feature (27)..(27): 2'-deoxy-2'-amino derivative
  misc_feature (1)..(16): 2'-Omethyl derivative
  misc_feature (18)..(23): 2'-Omethyl derivative
  misc_feature (25)..(26): 2'-Omethyl derivative
  misc_feature (28)..(35): 2'-Omethyl derivative
  misc_feature (36)..(36): n is an inverted deoxyabasic moiety
gaguacagccgaaaggcgagugaggucucggaauun

SEQ ID NO: 9533 - RNA, 35 nt, Artificial Sequence
  misc_feature (1)..(4): phosphorothioate linkage
  misc_feature (8)..(8): 2'-deoxy-2'-amino derivative
  misc_feature (11)..(11): 2'-deoxy-2'-amino derivative
  misc_feature (29)..(29): 2'-deoxy-2'-amino derivative
  misc_feature (1)..(7): 2'-Omethyl derivative
  misc_feature (13)..(25): 2'-Omethyl derivative
  misc_feature (27)..(28): 2'-Omethyl derivative
  misc_feature (30)..(34): 2'-Omethyl derivative
  misc_feature (35)..(35): n is an inverted deoxyabasic moiety
cggugacugaugaggccguuaggccgaauacaccn

SEQ ID NO: 9534 - RNA, 35 nt, Artificial Sequence
  misc_feature (1)..(4): phosphorothioate linkage
  misc_feature (8)..(8): 2'-deoxy-2'-amino derivative
  misc_feature (11)..(11): 2'-deoxy-2'-amino derivative
  misc_feature (29)..(29): 2'-deoxy-2'-amino derivative
  misc_feature (1)..(7): 2'-Omethyl derivative
  misc_feature (13)..(25): 2'-Omethyl derivative
  misc_feature (27)..(28): 2'-Omethyl derivative
  misc_feature (30)..(34): 2'-Omethyl derivative
  misc_feature (35)..(35): n is an inverted deoxyabasic moiety
gaaccgcugaugaggccguuaggccgaaugaguan

SEQ ID NO: 9535 - RNA, 35 nt, Artificial Sequence
  misc_feature (1)..(4): phosphorothioate linkage
  misc_feature (8)..(8): 2'-deoxy-2'-amino derivative
  misc_feature (11)..(11): 2'-deoxy-2'-amino derivative
  misc_feature (29)..(29): 2'-deoxy-2'-amino derivative
  misc_feature (1)..(7): 2'-Omethyl derivative
  misc_feature (13)..(25): 2'-Omethyl derivative
  misc_feature (27)..(28): 2'-Omethyl derivative
  misc_feature (30)..(34): 2'-Omethyl derivative
  misc_feature (35)..(35): n is an inverted deoxyabasic moiety
agagcccugaugaggccguuaggccgaauaguggn

SEQ ID NO: 9536 - RNA, 35 nt, Artificial Sequence
  misc_feature (1)..(4): phosphorothioate linkage
  misc_feature (8)..(8): 2'-deoxy-2'-amino derivative
  misc_feature (11)..(11): 2'-deoxy-2'-amino derivative
  misc_feature (29)..(29): 2'-deoxy-2'-amino derivative
  misc_feature (1)..(7): 2'-Omethyl derivative
  misc_feature (13)..(25): 2'-Omethyl derivative
  misc_feature (27)..(28): 2'-Omethyl derivative
  misc_feature (30)..(34): 2'-Omethyl derivative
  misc_feature (35)..(35): n is an inverted deoxyabasic moiety
aaggcccugaugaggccguuaggccgaauguggun

SEQ ID NO: 9537 - RNA, 35 nt, Artificial Sequence
  misc_feature (1)..(4): phosphorothioate linkage
  misc_feature (8)..(8): 2'-deoxy-2'-amino derivative
  misc_feature (11)..(11): 2'-deoxy-2'-amino derivative
  misc_feature (29)..(29): 2'-deoxy-2'-amino derivative
  misc_feature (1)..(7): 2'-Omethyl derivative
  misc_feature (13)..(25): 2'-Omethyl derivative
  misc_feature (27)..(28): 2'-Omethyl derivative
  misc_feature (30)..(34): 2'-Omethyl derivative
  misc_feature (35)..(35): n is an inverted deoxyabasic moiety
uugggccugaugaggccguuaggccgaaugccccn

SEQ ID NO: 9538 - RNA, 35 nt, Artificial Sequence
  misc_feature (1)..(4): phosphorothioate linkage
  misc_feature (8)..(8): 2'-deoxy-2'-amino derivative
  misc_feature (11)..(11): 2'-deoxy-2'-amino derivative
  misc_feature (29)..(29): 2'-deoxy-2'-amino derivative
  misc_feature (1)..(7): 2'-Omethyl derivative
  misc_feature (13)..(25): 2'-Omethyl derivative
  misc_feature (27)..(28): 2'-Omethyl derivative
  misc_feature (30)..(34): 2'-Omethyl derivative
  misc_feature (35)..(35): n is an inverted deoxyabasic moiety
gccauacugaugaggccguuaggccgaauggucun

SEQ ID NO: 9539 - RNA, 35 nt, Artificial Sequence
  misc_feature (1)..(4): phosphorothioate linkage
  misc_feature (8)..(8): 2'-deoxy-2'-amino derivative
  misc_feature (11)..(11): 2'-deoxy-2'-amino derivative
  misc_feature (29)..(29): 2'-deoxy-2'-amino derivative
  misc_feature (1)..(7): 2'-Omethyl derivative
  misc_feature (13)..(25): 2'-Omethyl derivative
  misc_feature (27)..(28): 2'-Omethyl derivative
  misc_feature (30)..(34): 2'-Omethyl derivative
  misc_feature (35)..(35): n is an inverted deoxyabasic moiety
auagugcugaugaggccguuaggccgaaucugcgn

SEQ ID NO: 9540 - RNA, 35 nt, Artificial Sequence
  misc_feature (1)..(4): phosphorothioate linkage
  misc_feature (8)..(8): 2'-deoxy-2'-amino derivative
  misc_feature (11)..(11): 2'-deoxy-2'-amino derivative
  misc_feature (29)..(11): 2'-deoxy-2'-amino derivative
  misc_feature (1)..(7): 2'-Omethyl derivative
  misc_feature (13)..(25): 2'-Omethyl derivative
  misc_feature (27)..(28): 2'-Omethyl derivative
  misc_feature (30)..(34): 2'-Omethyl derivative
  misc_feature (35)..(35): n is an inverted deoxyabasic moiety
gguccucugaugaggccguuaggccgaaucuuggn

SEQ ID NO: 9541 - RNA, 35 nt, Artificial Sequence
  misc_feature (1)..(4): phosphorothioate linkage
  misc_feature (8)..(8): 2'-deoxy-2'-amino derivative
  misc_feature (11)..(11): 2'-deoxy-2'-amino derivative
  misc_feature (29)..(29): 2'-deoxy-2'-amino derivative
  misc_feature (1)..(7): 2'-Omethyl derivative
  misc_feature (13)..(25): 2'-Omethyl derivative
  misc_feature (27)..(28): 2'-Omethyl derivative
  misc_feature (30)..(34): 2'-Omethyl derivative
  misc_feature (35)..(35): n is an inverted deoxyabasic moiety
gggucccugaugaggccguuaggccgaauucuugn

SEQ ID NO: 9542 - RNA, 35 nt, Artificial Sequence
  misc_feature (1)..(4): phosphorothioate linkage
  misc_feature (8)..(8): 2'-deoxy-2'-amino derivative
  misc_feature (11)..(11): 2'-deoxy-2'-amino derivative
  misc_feature (29)..(29): 2'-deoxy-2'-amino derivative
  misc_feature (1)..(7): 2'-Omethyl derivative
  misc_feature (13)..(25): 2'-Omethyl derivative
  misc_feature (27)..(28): 2'-Omethyl derivative
  misc_feature (30)..(34): 2'-Omethyl derivative
  misc_feature (35)..(35): n is an inverted deoxyabasic moiety
ggccuucugaugaggccguuaggccgaaugguacn

SEQ ID NO: 9543 - RNA, 35 nt, Artificial Sequence
  misc_feature (1)..(4): phosphorothioate linkage
  misc_feature (8)..(8): 2'-deoxy-2'-amino derivative
  misc_feature (11)..(11): 2'-deoxy-2'-amino derivative
  misc_feature (29)..(29): 2'-deoxy-2'-amino derivative
  misc_feature (1)..(7): 2'-Omethyl derivative
  misc_feature (13)..(25): 2'-Omethyl derivative
  misc_feature (27)..(28): 2'-Omethyl derivative
  misc_feature (30)..(34): 2'-Omethyl derivative
  misc_feature (35)..(35): n is an inverted deoxyabasic moiety
cuugugcugaugaggccguuaggccgaauacugcn

SEQ ID NO: 9544 - RNA, 35 nt, Artificial Sequence
  misc_feature (1)..(4): phosphorothioate linkage
  misc_feature (8)..(8): 2'-deoxy-2'-amino derivative
  misc_feature (11)..(11): 2'-deoxy-2'-amino derivative
  misc_feature (29)..(29): 2'-deoxy-2'-amino derivative
  misc_feature (1)..(7): 2'-Omethyl derivative
  misc_feature (13)..(25): 2'-Omethyl derivative
  misc_feature (27)..(28): 2'-Omethyl derivative
  misc_feature (30)..(34): 2'-Omethyl derivative
  misc_feature (35)..(35): n is an inverted deoxyabasic moiety
ugccugcugaugaggccguuaggccgaauagggun

SEQ ID NO: 9545 - RNA, 35 nt, Artificial Sequence
  misc_feature (1)..(4): phosphorothioate linkage
  misc_feature (8)..(8): 2'-deoxy-2'-amino derivative
  misc_feature (11)..(11): 2'-deoxy-2'-amino derivative
  misc_feature (29)..(29): 2'-deoxy-2'-amino derivative
  misc_feature (1)..(7): 2'-Omethyl derivative
  misc_feature (13)..(25): 2'-Omethyl derivative
  misc_feature (27)..(28): 2'-Omethyl derivative
  misc_feature (30)..(34): 2'-Omethyl derivative
  misc_feature (35)..(35): n is an inverted deoxyabasic moiety
gaccggcugaugaggccguuaggccgaauccuuun

SEQ ID NO: 9546 - RNA, 37 nt, Artificial Sequence
  misc_feature (1)..(4): phosphorothioate linkage
  misc_feature (9)..(9): 2'-deoxy-2'-amino derivative
  misc_feature (12)..(12): 2'-deoxy-2'-amino derivative
  misc_feature (30)..(30): 2'-deoxy-2'-amino derivative
  misc_feature (1)..(8): 2'-Omethyl derivative
  misc_feature (14)..(26): 2'-Omethyl derivative
  misc_feature (28)..(29): 2'-Omethyl derivative
  misc_feature (31)..(36): 2'-Omethyl derivative
  misc_feature (37)..(37): n is an inverted deoxyabasic moiety
ccggugacugaugaggccguuaggccgaauacaccgn

SEQ ID NO: 9547 - RNA, 37 nt, Artificial Sequence
  misc_feature (1)..(4): phosphorothioate linkage
  misc_feature (9)..(9): 2'-deoxy-2'-amino derivative
  misc_feature (12)..(12): 2'-deoxy-2'-amino derivative
  misc_feature (30)..(30): 2'-deoxy-2'-amino derivative
  misc_feature (1)..(8): 2'-Omethyl derivative
  misc_feature (14)..(26): 2'-Omethyl derivative
  misc_feature (28)..(29): 2'-Omethyl derivative
  misc_feature (31)..(36): 2'-Omethyl derivative
  misc_feature (37)..(37): n is an inverted deoxyabasic moiety
gagagcccugaugaggccguuaggccgaauaguggun

SEQ ID NO: 9548 - RNA, 37 nt, Artificial Sequence
  misc_feature (1)..(4): phosphorothioate linkage
  misc_feature (9)..(9): 2'-deoxy-2'-amino derivative
  misc_feature (12)..(12): 2'-deoxy-2'-amino derivative
  misc_feature (30)..(30): 2'-deoxy-2'-amino derivative
  misc_feature (1)..(8): 2'-Omethyl derivative
  misc_feature (14)..(26): 2'-Omethyl derivative
  misc_feature (28)..(29): 2'-Omethyl derivative
  misc_feature (31)..(36): 2'-Omethyl derivative
  misc_feature (37)..(37): n is an inverted deoxyabasic moiety
ggaaccgcugaugaggccguuaggccgaaugaguacn

SEQ ID NO: 9549 - RNA, 37 nt, Artificial Sequence
  misc_feature (1)..(4): phosphorothioate linkage
  misc_feature (9)..(9): 2'-deoxy-2'-amino derivative
  misc_feature (12)..(12): 2'-deoxy-2'-amino derivative
  misc_feature (30)..(30): 2'-deoxy-2'-amino derivative
  misc_feature (1)..(8): 2'-Omethyl derivative
  misc_feature (14)..(26): 2'-Omethyl derivative
  misc_feature (28)..(29): 2'-Omethyl derivative
  misc_feature (31)..(36): 2'-Omethyl derivative
  misc_feature (37)..(37): n is an inverted deoxyabasic moiety
uuugggccugaugaggccguuaggccgaaugcccccn

SEQ ID NO: 9550 - RNA, 37 nt, Artificial Sequence
  misc_feature (1)..(4): phosphorothioate linkage
  misc_feature (9)..(9): 2'-deoxy-2'-amino derivative
  misc_feature (12)..(12): 2'-deoxy-2'-amino derivative
  misc_feature (30)..(30): 2'-deoxy-2'-amino derivative
  misc_feature (1)..(8): 2'-Omethyl derivative
  misc_feature (14)..(26): 2'-Omethyl derivative
  misc_feature (28)..(29): 2'-Omethyl derivative
  misc_feature (31)..(36): 2'-Omethyl derivative
  misc_feature (37)..(37): n is an inverted deoxyabasic moiety
agccauacugaugaggccguuaggccgaauggucugn

SEQ ID NO: 9551 - RNA, 37 nt, Artificial Sequence
  misc_feature (1)..(4): phosphorothioate linkage
  misc_feature (9)..(9): 2'-deoxy-2'-amino derivative
  misc_feature (12)..(12): 2'-deoxy-2'-amino derivative
  misc_feature (30)..(30): 2'-deoxy-2'-amino derivative
  misc_feature (1)..(8): 2'-Omethyl derivative
  misc_feature (14)..(26): 2'-Omethyl derivative
  misc_feature (28)..(29): 2'-Omethyl derivative
  misc_feature (31)..(36): 2'-Omethyl derivative
  misc_feature (37)..(37): n is an inverted deoxyabasic moiety
cauagugcugaugaggccguuaggccgaaucugcggn

SEQ ID NO: 9552 - RNA, 37 nt, Artificial Sequence
  misc_feature (1)..(4): phosphorothioate linkage
  misc_feature (9)..(9): 2'-deoxy-2'-amino derivative
  misc_feature (12)..(12): 2'-deoxy-2'-amino derivative
  misc_feature (30)..(30): 2'-deoxy-2'-amino derivative
  misc_feature (1)..(8): 2'-Omethyl derivative
  misc_feature (14)..(26): 2'-Omethyl derivative
  misc_feature (28)..(29): 2'-Omethyl derivative
  misc_feature (31)..(36): 2'-Omethyl derivative
  misc_feature (37)..(37): n is an inverted deoxyabasic moiety
ggguccucugaugaggccguuaggccgaaucuuggan

SEQ ID NO: 9553 - RNA, 37 nt, Artificial Sequence
  misc_feature (1)..(4): phosphorothioate linkage
  misc_feature (9)..(9): 2'-deoxy-2'-amino derivative
  misc_feature (12)..(12): 2'-deoxy-2'-amino derivative
  misc_feature (30)..(30): 2'-deoxy-2'-amino derivative
  misc_feature (1)..(8): 2'-Omethyl derivative
  misc_feature (14)..(26): 2'-Omethyl derivative
  misc_feature (28)..(29): 2'-Omethyl derivative
  misc_feature (31)..(36): 2'-Omethyl derivative
  misc_feature (37)..(37): n is an inverted deoxyabasic moiety
aggccuucugaugaggccguuaggccgaaugguacun

SEQ ID NO: 9554 - RNA, 37 nt, Artificial Sequence
  misc_feature (1)..(4): phosphorothioate linkage
  misc_feature (9)..(9): 2'-deoxy-2'-amino derivative
  misc_feature (12)..(12): 2'-deoxy-2'-amino derivative
  misc_feature (30)..(30): 2'-deoxy-2'-amino derivative
  misc_feature (1)..(8): 2'-Omethyl derivative
  misc_feature (14)..(26): 2'-Omethyl derivative
  misc_feature (28)..(29): 2'-Omethyl derivative
  misc_feature (36)..(29): 2'-Omethyl derivative
  misc_feature (37)..(37): n is an inverted deoxyabasic moiety
aaaggcccugaugaggccguuaggccgaaugugguan

SEQ ID NO: 9555 - RNA, 37 nt, Artificial Sequence
  misc_feature (1)..(4): phosphorothioate linkage
  misc_feature (9)..(9): 2'-deoxy-2'-amino derivative
  misc_feature (12)..(12): 2'-deoxy-2'-amino derivative
  misc_feature (30)..(30): 2'-deoxy-2'-amino derivative
  misc_feature (1)..(8): 2'-Omethyl derivative
  misc_feature (14)..(26): 2'-Omethyl derivative
  misc_feature (28)..(29): 2'-Omethyl derivative
  misc_feature (31)..(36): 2'-Omethyl derivative
  misc_feature (37)..(37): n is an inverted deoxyabasic moiety
cugccugcugaugaggccguuaggccgaauagggugn

SEQ ID NO: 9556 - RNA, 37 nt, Artificial Sequence
  misc_feature (1)..(4): phosphorothioate linkage
  misc_feature (9)..(9): 2'-deoxy-2'-amino derivative
  misc_feature (12)..(12): 2'-deoxy-2'-amino derivative
  misc_feature (30)..(30): 2'-deoxy-2'-amino derivative
  misc_feature (1)..(8): 2'-Omethyl derivative
  misc_feature (14)..(26): 2'-Omethyl derivative
  misc_feature (28)..(29): 2'-Omethyl derivative
  misc_feature (31)..(36): 2'-Omethyl derivative
  misc_feature (37)..(37): n is an inverted deoxyabasic moiety
ccuugugcugaugaggccguuaggccgaauacugccn

SEQ ID NO: 9557 - RNA, 36 nt, Artificial Sequence
  misc_feature (36)..(36): n is an inverted deoxyabasic moiety
  misc_feature (1)..(8): 2'-Omethyl derivative
  misc_feature (12)..(16): 2'-Omethyl derivative
  misc_feature (18)..(26): 2'-Omethyl derivative
  misc_feature (28)..(35): 2'-Omethyl derivative
uggaagaugauggcaugcacuaugcgcgacugagan

SEQ ID NO: 9558 - RNA, 36 nt, Artificial Sequence
  misc_feature (36)..(36): n is an inverted deoxyabasic moiety
  misc_feature (1)..(8): 2'-Omethyl derivative
  misc_feature (12)..(16): 2'-Omethyl derivative
  misc_feature (18)..(26): 2'-Omethyl derivative
  misc_feature (28)..(35): 2'-Omethyl derivative
ggagaggugauggcaugcacuaugcgcgauauacan

SEQ ID NO: 9559 - RNA, 36 nt, Artificial Sequence
  misc_feature (36)..(36): n is an inverted deoxyabasic moiety
  misc_feature (1)..(8): 2'-Omethyl derivative
  misc_feature (12)..(16): 2'-Omethyl derivative
  misc_feature (18)..(26): 2'-Omethyl derivative
  misc_feature (28)..(35): 2'-Omethyl derivative
ucuaaggugauggcaugcacuaugcgcgacacggun

SEQ ID NO: 9560 - RNA, 36 nt, Artificial Sequence
  misc_feature (36)..(36): n is an inverted deoxyabasic moiety
  misc_feature (1)..(8): 2'-Omethyl derivative
  misc_feature (12)..(16): 2'-Omethyl derivative
  misc_feature (18)..(26): 2'-Omethyl derivative
  misc_feature (28)..(35): 2'-Omethyl derivative
accaccuugauggcaugcacuaugcgcgacuccacn

SEQ ID NO: 9561 - RNA, 36 nt, Artificial Sequence
  misc_feature (36)..(36): n is an inverted deoxyabasic moiety
  misc_feature (1)..(8): 2'-Omethyl derivative
  misc_feature (12)..(16): 2'-Omethyl derivative
  misc_feature (18)..(26): 2'-Omethyl derivative
  misc_feature (28)..(35): 2'-Omethyl derivative
acagguuugauggcaugcacuaugcgcgaacucgun

SEQ ID NO: 9562 - RNA, 36 nt, Artificial Sequence
  misc_feature (36)..(36): n is an inverted deoxyabasic moiety
  misc_feature (1)..(8): 2'-Omethyl derivative
  misc_feature (12)..(16): 2'-Omethyl derivative
  misc_feature (18)..(26): 2'-Omethyl derivative
  misc_feature (28)..(35): 2'-Omethyl derivative
ggaugguugauggcaugcacuaugcgcgagacaggn

SEQ ID NO: 9563 - RNA, 36 nt, Artificial Sequence
  misc_feature (36)..(36): n is an inverted deoxyabasic moiety
  misc_feature (1)..(8): 2'-Omethyl derivative
  misc_feature (12)..(16): 2'-Omethyl derivative
  misc_feature (18)..(26): 2'-Omethyl derivative
  misc_feature (28)..(35): 2'-Omethyl derivative
ggaaaagugauggcaugcacuaugcgcgaacaggan

SEQ ID NO: 9564 - RNA, 36 nt, Artificial Sequence
  misc_feature (36)..(36): n is an inverted deoxyabasic moiety
  misc_feature (1)..(8): 2'-Omethyl derivative
  misc_feature (12)..(16): 2'-Omethyl derivative
  misc_feature (18)..(26): 2'-Omethyl derivative
  misc_feature (28)..(35): 2'-Omethyl derivative
agaagaaugauggcaugcacuaugcgcgacgaggan

SEQ ID NO: 9565 - RNA, 36 nt, Artificial Sequence
  misc_feature (36)..(36): n is an inverted deoxyabasic moiety
  misc_feature (1)..(8): 2'-Omethyl derivative
  misc_feature (12)..(16): 2'-Omethyl derivative
  misc_feature (18)..(26): 2'-Omethyl derivative
  misc_feature (28)..(35): 2'-Omethyl derivative
ggacgagugauggcaugcacuaugcgcgacuuugun

SEQ ID NO: 9566 - RNA, 36 nt, Artificial Sequence
  misc_feature (36)..(36): n is an inverted deoxyabasic moiety
  misc_feature (1)..(8): 2'-Omethyl derivative
  misc_feature (12)..(16): 2'-Omethyl derivative
  misc_feature (18)..(26): 2'-Omethyl derivative
  misc_feature (28)..(35): 2'-Omethyl derivative
gguagguugauggcaugcacuaugcgcgaaguggcn

SEQ ID NO: 9567 - RNA, 36 nt, Artificial Sequence
  misc_feature (36)..(36): n is an inverted deoxyabasic moiety
  misc_feature (17)..(17): 2'-deoxy-2'-amino derivative
  misc_feature (27)..(27): 2'-deoxy-2'-amino derivative
  misc_feature (1)..(16): 2'-Omethyl derivative
  misc_feature (18)..(23): 2'-Omethyl derivative
  misc_feature (26)..(26): 2'-Omethyl derivative
  misc_feature (28)..(35): 2'-Omethyl derivative
ugagagagccgaaaggcgagugaggucugaggaagn

SEQ ID NO: 9568 - RNA, 36 nt, Artificial Sequence
  misc_feature (36)..(36): n is an inverted deoxyabasic moiety
  misc_feature (17)..(17): 2'-deoxy-2'-amino derivative
  misc_feature (27)..(27): 2'-deoxy-2'-amino derivative
  misc_feature (1)..(16): 2'-Omethyl derivative
  misc_feature (18)..(23): 2'-Omethyl derivative
  misc_feature (26)..(26): 2'-Omethyl derivative
  misc_feature (28)..(35): 2'-Omethyl derivative
aggugaagccgaaaggcgagugaggucuagcugagn

SEQ ID NO: 9569 - RNA, 36 nt, Artificial Sequence
  misc_feature (36)..(36): n is an inverted deoxyabasic moiety
  misc_feature (17)..(17): 2'-deoxy-2'-amino derivative
  misc_feature (27)..(27): 2'-deoxy-2'-amino derivative
  misc_feature (1)..(16): 2'-Omethyl derivative
  misc_feature (18)..(23): 2'-Omethyl derivative
  misc_feature (26)..(26): 2'-Omethyl derivative
  misc_feature (28)..(35): 2'-Omethyl derivative
ggaaaaggccgaaaggcgagugaggucuaacaggan

SEQ ID NO: 9570 - RNA, 36 nt, Artificial Sequence
  misc_feature (36)..(36): n is an inverted deoxyabasic moiety
  misc_feature (17)..(27): 2'-deoxy-2'-amino derivative
  misc_feature (27)..(27): 2'-deoxy-2'-amino derivative
  misc_feature (1)..(16): 2'-Omethyl derivative
  misc_feature (18)..(23): 2'-Omethyl derivative
  misc_feature (26)..(26): 2'-Omethyl derivative
  misc_feature (28)..(35): 2'-Omethyl derivative
agaagaagccgaaaggcgagugaggucuacgaggan

SEQ ID NO: 9571 - RNA, 36 nt, Artificial Sequence
  misc_feature (36)..(36): n is an inverted deoxyabasic moiety
  misc_feature (17)..(17): 2'-deoxy-2'-amino derivative
  misc_feature (27)..(27): 2'-deoxy-2'-amino derivative
  misc_feature (1)..(16): 2'-Omethyl derivative
  misc_feature (18)..(23): 2'-Omethyl derivative
  misc_feature (26)..(26): 2'-Omethyl derivative
  misc_feature (28)..(35): 2'-Omethyl derivative
gaguugagccgaaaggcgagugaggucuuggagugn

SEQ ID NO: 9572 - RNA, 36 nt, Artificial Sequence
  misc_feature (36)..(36): n is an inverted deoxyabasic moiety
  misc_feature (17)..(17): 2'-deoxy-2'-amino derivative
  misc_feature (27)..(27): 2'-deoxy-2'-amino derivative
  misc_feature (1)..(16): 2'-Omethyl derivative
  misc_feature (18)..(23): 2'-Omethyl derivative
  misc_feature (26)..(26): 2'-Omethyl derivative
  misc_feature (28)..(35): 2'-Omethyl derivative
aagaggagccgaaaggcgagugaggucugcggcgan

SEQ ID NO: 9573 - RNA, 36 nt, Artificial Sequence
  misc_feature (36)..(36): n is an inverted deoxyabasic moiety
  misc_feature (17)..(17): 2'-deoxy-2'-amino derivative
  misc_feature (27)..(27): 2'-deoxy-2'-amino derivative
  misc_feature (1)..(16): 2'-Omethyl derivative
  misc_feature (18)..(23): 2'-Omethyl derivative
  misc_feature (26)..(26): 2'-Omethyl derivative
  misc_feature (28)..(35): 2'-Omethyl derivative
uggaagagccgaaaggcgagugaggucuacugagan

SEQ ID NO: 9574 - RNA, 36 nt, Artificial Sequence
  misc_feature (36)..(36): n is an inverted deoxyabasic moiety
  misc_feature (17)..(17): 2'-deoxy-2'-amino derivative
  misc_feature (27)..(27): 2'-deoxy-2'-amino derivative
  misc_feature (1)..(16): 2'-Omethyl derivative
  misc_feature (18)..(23): 2'-Omethyl derivative
  misc_feature (26)..(26): 2'-Omethyl derivative
  misc_feature (28)..(35): 2'-Omethyl derivative
aggaguagccgaaaggcgagugaggucuguggaggn

SEQ ID NO: 9575 - RNA, 36 nt, Artificial Sequence
  misc_feature (36)..(36): n is an inverted deoxyabasic moiety
  misc_feature (17)..(17): 2'-deoxy-2'-amino derivative
  misc_feature (27)..(27): 2'-deoxy-2'-amino derivative
  misc_feature (1)..(16): 2'-Omethyl derivative
  misc_feature (18)..(23): 2'-Omethyl derivative
  misc_feature (26)..(26): 2'-Omethyl derivative
  misc_feature (28)..(35): 2'-Omethyl derivative
cgaagcagccgaaaggcgagugaggucuauguggan

SEQ ID NO: 9576 - RNA, 36 nt, Artificial Sequence
  misc_feature (36)..(36): n is an inverted deoxyabasic moiety
  misc_feature (17)..(17): 2'-deoxy-2'-amino derivative
  misc_feature (27)..(27): 2'-deoxy-2'-amino derivative
  misc_feature (1)..(16): 2'-Omethyl derivative
  misc_feature (18)..(23): 2'-Omethyl derivative
  misc_feature (26)..(26): 2'-Omethyl derivative
  misc_feature (28)..(35): 2'-Omethyl derivative
uggaagagccgaaaggcgagugaggucuggcgugan

SEQ ID NO: 9577 - RNA, 37 nt, Artificial Sequence
  misc_feature (37)..(37): n is an inverted deoxyabasic moiety
  misc_feature (30)..(30): n is inosine
  misc_feature (1)..(7): 2'-Omethyl derivative
  misc_feature (15)..(26): 2'-Omethyl derivative
  misc_feature (31)..(36): 2'-Omethyl derivative
aagaggacugaugaggccguuaggccgaanauagagn

SEQ ID NO: 9578 - RNA, 37 nt, Artificial Sequence
  misc_feature (37)..(37): n is an inverted deoxyabasic moiety
  misc_feature (30)..(30): n is inosine
  misc_feature (1)..(7): 2'-Omethyl derivative
  misc_feature (15)..(26): 2'-Omethyl derivative
  misc_feature (31)..(36): 2'-Omethyl derivative
ggugaaccugaugaggccguuaggccgaancugagan

SEQ ID NO: 9579 - RNA, 37 nt, Artificial Sequence
  misc_feature (37)..(37): n is an inverted deoxyabasic moiety
  misc_feature (30)..(30): n is inosine
  misc_feature (1)..(7): 2'-Omethyl derivative
  misc_feature (15)..(26): 2'-Omethyl derivative
  misc_feature (31)..(36): 2'-Omethyl derivative
cgaggaacugaugaggccguuaggccgaanagaggan

SEQ ID NO: 9580 - RNA, 37 nt, Artificial Sequence
  misc_feature (37)..(37): n is an inverted deoxyabasic moiety
  misc_feature (30)..(30): n is inosine
  misc_feature (1)..(7): 2'-Omethyl derivative
  misc_feature (15)..(26): 2'-Omethyl derivative
  misc_feature (31)..(36): 2'-Omethyl derivative
ugauggacugaugaggccguuaggccgaancugugan

SEQ ID NO: 9581 - RNA, 37 nt, Artificial Sequence
  misc_feature (37)..(37): n is an inverted deoxyabasic moiety
  misc_feature (30)..(30): n is inosine
  misc_feature (1)..(7): 2'-Omethyl derivative
  misc_feature (15)..(26): 2'-Omethyl derivative
  misc_feature (31)..(36): 2'-Omethyl derivative
ugaggaacugaugaggccguuaggccgaanguggagn

SEQ ID NO: 9582 - RNA, 37 nt, Artificial Sequence
  misc_feature (37)..(37): n is an inverted deoxyabasic moiety
  misc_feature (30)..(30): n is inosine
  misc_feature (1)..(7): 2'-Omethyl derivative
  misc_feature (15)..(26): 2'-Omethyl derivative
  misc_feature (31)..(36): 2'-Omethyl derivative
gacacugcugaugaggccguuaggccgaanacaccan

SEQ ID NO: 9583 - RNA, 37 nt, Artificial Sequence
  misc_feature (37)..(37): n is an inverted deoxyabasic moiety
  misc_feature (30)..(30): n is inosine
  misc_feature (1)..(7): 2'-Omethyl derivative
  misc_feature (15)..(26): 2'-Omethyl derivative
  misc_feature (31)..(36): 2'-Omethyl derivative
gagaugacugaugaggccguuaggccgaangcgaagn

SEQ ID NO: 9584 - RNA, 37 nt, Artificial Sequence
  misc_feature (37)..(37): n is an inverted deoxyabasic moiety
  misc_feature (30)..(30): n is inosine
  misc_feature (1)..(7): 2'-Omethyl derivative
  misc_feature (15)..(26): 2'-Omethyl derivative
  misc_feature (31)..(36): 2'-Omethyl derivative
ggaugagcugaugaggccguuaggccgaanagaggun

SEQ ID NO: 9585 - RNA, 37 nt, Artificial Sequence
  misc_feature (37)..(37): n is an inverted deoxyabasic moiety
  misc_feature (30)..(30): n is inosine
  misc_feature (1)..(7): 2'-Omethyl derivative
  misc_feature (15)..(26): 2'-Omethyl derivative
  misc_feature (31)..(36): 2'-Omethyl derivative
ugugcagcugaugaggccguuaggccgaangaugaan

SEQ ID NO: 9586 - RNA, 37 nt, Artificial Sequence
  misc_feature (37)..(37): n is an inverted deoxyabasic moiety
  misc_feature (30)..(30): n is inosine
  misc_feature (1)..(7): 2'-Omethyl derivative
  misc_feature (15)..(26): 2'-Omethyl derivative
  misc_feature (31)..(36): 2'-Omethyl derivative
uggaugacugaugaggccguuaggccgaancuguugn

SEQ ID NO: 9587 - RNA, 37 nt, Artificial Sequence
  misc_feature (37)..(37): n is an inverted deoxyabasic moiety
  misc_feature (1)..(7): 2'-Omethyl derivative
  misc_feature (15)..(26): 2'-Omethyl derivative
  misc_feature (31)..(36): 2'-Omethyl derivative
gcugagacugaugaggccguuaggccgaaacgaggan

SEQ ID NO: 9588 - RNA, 37 nt, Artificial Sequence
  misc_feature (37)..(37): n is an inverted deoxyabasic moiety
  misc_feature (1)..(7): 2'-Omethyl derivative
  misc_feature (15)..(26): 2'-Omethyl derivative
  misc_feature (31)..(36): 2'-Omethyl derivative
uccuguucugaugaggccguuaggccgaaaugugccn

SEQ ID NO: 9589 - RNA, 37 nt, Artificial Sequence
  misc_feature (37)..(37): n is an inverted deoxyabasic moiety
  misc_feature (1)..(7): 2'-Omethyl derivative
  misc_feature (15)..(26): 2'-Omethyl derivative
  misc_feature (31)..(36): 2'-Omethyl derivative
ggaaggacugaugaggccguuaggccgaaaggaugcn

SEQ ID NO: 9590 - RNA, 37 nt, Artificial Sequence
  misc_feature (37)..(37): n is an inverted deoxyabasic moiety
  misc_feature (1)..(7): 2'-Omethyl derivative
  misc_feature (15)..(26): 2'-Omethyl derivative
  misc_feature (31)..(36): 2'-Omethyl derivative
cuccacgcugaugaggccguuaggccgaaacuccucn

SEQ ID NO: 9591 - RNA, 37 nt, Artificial Sequence
  misc_feature (37)..(37): n is an inverted deoxyabasic moiety
  misc_feature (1)..(7): 2'-Omethyl derivative
  misc_feature (15)..(26): 2'-Omethyl derivative
  misc_feature (31)..(36): 2'-Omethyl derivative
ggagugacugaugaggccguuaggccgaaaaugcgcn

SEQ ID NO: 9592 - RNA, 37 nt, Artificial Sequence
  misc_feature (37)..(37): n is an inverted deoxyabasic moiety
  misc_feature (1)..(7): 2'-Omethyl derivative
  misc_feature (15)..(26): 2'-Omethyl derivative
  misc_feature (31)..(36): 2'-Omethyl derivative
gcgagcccugaugaggccguuaggccgaaacgagucn

SEQ ID NO: 9593 - RNA, 37 nt, Artificial Sequence
  misc_feature (37)..(37): n is an inverted deoxyabasic moiety
  misc_feature (1)..(7): 2'-Omethyl derivative
  misc_feature (15)..(26): 2'-Omethyl derivative
  misc_feature (31)..(36): 2'-Omethyl derivative
gcuggaacugaugaggccguuaggccgaaacacugan

SEQ ID NO: 9594 - RNA, 37 nt, Artificial Sequence
  misc_feature (37)..(37): n is an inverted deoxyabasic moiety
  misc_feature (1)..(7): 2'-Omethyl derivative
  misc_feature (15)..(26): 2'-Omethyl derivative
  misc_feature (31)..(36): 2'-Omethyl derivative
aggaugacugaugaggccguuaggccgaaagagaggn

SEQ ID NO: 9595 - RNA, 37 nt, Artificial Sequence
  misc_feature (37)..(37): n is an inverted deoxyabasic moiety
  misc_feature (1)..(7): 2'-Omethyl derivative
  misc_feature (15)..(26): 2'-Omethyl derivative
  misc_feature (31)..(36): 2'-Omethyl derivative
ugaggagcugaugaggccguuaggccgaaacguggan

SEQ ID NO: 9596 - RNA, 37 nt, Artificial Sequence
  misc_feature (37)..(37): n is an inverted deoxyabasic moiety
  misc_feature (1)..(7): 2'-Omethyl derivative
  misc_feature (15)..(26): 2'-Omethyl derivative
  misc_feature (31)..(36): 2'-Omethyl derivative
gacuggacugaugaggccguuaggccgaaaugcacgn

SEQ ID NO: 9597 - DNA, 30 bp, Artificial Sequence
  misc_feature (30)..(30): n is an inverted deoxyabasic moiety
  misc_feature (1)..(7): 2'-Omethyl derivative
  misc_feature (23)..(29): 2'-Omethyl derivative
aggaagaggctagctacaacgaagagaaan

SEQ ID NO: 9598 - DNA, 30 bp, artificial sequence
  misc_feature (30)..(30): "n" is an inverted deoxyabasic moiety
  misc_feature (1)..(7): 2'-Omethyl derivative
  misc_feature (23)..(29): 2'-Omethyl derivative
ugagagaggctagctacaacgagaggaagn

SEQ ID NO: 9599 - DNA, 30 bp, artificial sequence
  misc_feature (30)..(30): n is an inverted deoxyabasic moiety
  misc_feature (1)..(7): 2'-Omethyl derivative
  misc_feature (23)..(29): 2'-Omethyl derivative
aggugaaggctagctacaacgaagcugagn

SEQ ID NO: 9600 - DNA, 30 bp, Artificial Sequence
  misc_feature (30)..(30): n is an inverted deoxyabasic moiety
  misc_feature (1)..(7): 2'-Omethyl derivative
  misc_feature (23)..(29): 2'-Omethyl derivative
cuggugaggctagctacaacgaggaggcun

SEQ ID NO: 9601 - DNA, 30 bp, artificial sequence
  misc_feature (30)..(30): n is an inverted deoxyabasic moiety
  misc_feature (1)..(7): 2'-Omethyl derivative
  misc_feature (23)..(29): 2'-Omethyl derivative
ugguguaggctagctacaacgagcguugan

SEQ ID NO: 9602 - DNA, 30 bp, artificial sequence
  misc_feature (30)..(30): n is an inverted deoxyabasic moiety
  misc_feature (1)..(7): 2'-Omethyl derivative
  misc_feature (23)..(29): 2'-Omethyl derivative
aagaggaggctagctacaacgagcggcgan

SEQ ID NO: 9603 - DNA, 30 bp, artificial sequence
  misc_feature (30)..(30): n is an inverted deoxyabasic moiety
  misc_feature (1)..(7): 2'-Omethyl derivative
  misc_feature (23)..(29): 2'-Omethyl derivative
aaggagaggctagctacaacgagaaggcgn

SEQ ID NO: 9604 - DNA, 30 bp, artificial sequence
  misc_feature (1)..(7): 2'-Omethyl derivative
  misc_feature (23)..(29): 2'-Omethyl derivative
  misc_feature (30)..(30): n is an inverted deoxyabasic moiety
aggaggaggctagctacaacgagagagagn

SEQ ID NO: 9605 - DNA, 30 bp, artificial sequence
  misc_feature (30)..(30): n is an inverted deoxyabasic moiety
  misc_feature (1)..(7): 2'-Omethyl derivative
  misc_feature (23)..(29): 2'-Omethyl derivative
aggaguaggctagctacaacgaguggaggn

SEQ ID NO: 9606 - DNA, 30 bp, artificial sequence
  misc_feature (30)..(30): n is an inverted deoxyabasic moiety
  misc_feature (1)..(7): 2'-Omethyl derivative
  misc_feature (23)..(29): 2'-Omethyl derivative
guugugaggctagctacaacgauuggaggn

SEQ ID NO: 9607 - RNA, 33 nt, Artificial Sequence
  misc_feature (1)..(4): phosphorothioate linkage
  misc_feature (18)..(19): n is an acyclic galactose-amine linker
  misc_feature (1)..(7): 2'-Omethyl derivative
  misc_feature (11)..(11): 2'-Omethyl derivative
  misc_feature (13)..(17): 2'-Omethyl derivative
  misc_feature (20)..(23): 2'-Omethyl derivative
  misc_feature (25)..(26): 2'-Omethyl derivative
  misc_feature (28)..(32): 2'-Omethyl derivative
  misc_feature (33)..(33): n is an inverted deoxyabasic moiety
ccaagacngangaggcgnnagccgaaaggaccn

SEQ ID NO: 9608 - RNA, 38 nt, Artificial Sequence
  misc_feature (6)..(9): phosphorothioate linkage
  misc_feature (1)..(5): n is an acyclic galactose-amine linker
  misc_feature (6)..(12): 2'-Omethyl derivative
  misc_feature (16)..(16): 2'-Omethyl derivative
  misc_feature (18)..(28): 2'-Omethyl derivative
  misc_feature (30)..(31): 2'-Omethyl derivative
  misc_feature (33)..(37): 2'-Omethyl derivative
  misc_feature (38)..(38): n is an inverted deoxyabasic moiety
nnnnnccaagacngangaggcgnnagccgaaaggaccn

SEQ ID NO: 9609 - RNA, 37 nt, Artificial Sequence
  misc_feature (4)..(7): phosphorothioate linkage
  misc_feature (1)..(3): n is an acyclic galactose-amine linker
  misc_feature (21)..(23): n is an acyclic galactose-amine linker
  misc_feature (4)..(10): 2'-Omethyl derivative
  misc_feature (14)..(14): 2'-Omethyl derivative
  misc_feature (16)..(20): 2'-Omethyl derivative
  misc_feature (24)..(27): 2'-Omethyl derivative
  misc_feature (29)..(30): 2'-Omethyl derivative
  misc_feature (32)..(36): 2'-Omethyl derivative
  misc_feature (37)..(37): n is an inverted deoxyabasic moiety
nnnccaagacugangaggcgnnnagccgaaaggaccn

SEQ ID NO: 9610 - RNA, 34 nt, Artificial Sequence
  misc_feature (1)..(4): phosphorothioate linkage
  misc_feature (18)..(20): n is an acyclic galactose-amine linker
  misc_feature (1)..(7): 2'-Omethyl derivative
  misc_feature (11)..(11): 2'-Omethyl derivative
  misc_feature (13)..(17): 2'-Omethyl derivative
  misc_feature (21)..(24): 2'-Omethyl derivative
  misc_feature (26)..(27): 2'-Omethyl derivative
  misc_feature (29)..(33): 2'-Omethyl derivative
  misc_feature (34)..(34): n is an inverted deoxyabasic moiety
ccaagacngangaggcgnnnagccgaaaggaccn

SEQ ID NO: 9611 - RNA, 37 nt, Artificial Sequence
  misc_feature (1)..(3): phosphorothioate ester linkage
  misc_feature (37)..(37): n is inverted deoxyabasic moiety
  misc_feature (31)..(36): 2'-Omethyl derivative
  misc_feature (28)..(29): 2'-Omethyl derivative
  misc_feature (14)..(26): 2'-Omethyl derivative
  misc_feature (12)..(12): 2'-deoxy-2'-amino derivative
  misc_feature (9)..(9): 2'-deoxy-2'-amino derivative
  misc_feature (1)..(8): 2'-Omethyl derivative
gcgugaacugaugaggccguuaggccgaaacaguagn

SEQ ID NO: 9612 - RNA, 37 nt, Artificial Sequence
  misc_feature (1)..(3): phosphorothioate linkage
  misc_feature (37)..(37): n is inverted deoxyabasic
  misc_feature (1)..(8): 2'-Omethyl derivative
  misc_feature (31)..(36): 2'-Omethyl derivative
  misc_feature (28)..(29): 2'-Omethyl derivative
  misc_feature (14)..(26): 2'-Omethyl derivative
  misc_feature (9)..(9): 2'-deoxy-2'-amino derivative
  misc_feature (12)..(12): 2'-deoxy-2'-amino derivative
auggcuacugaugaggccguuaggccgaaacgcuuun

SEQ ID NO: 9613 - RNA, 37 nt, Artificial Sequence
  misc_feature (1)..(3): phosphorothioate linkage
  misc_feature (37)..(37): n is inverted deoxyabasic
  misc_feature (9)..(9): 2'-deoxy-2'-amino derivative
  misc_feature (12)..(12): 2'-deoxy-2'-amino derivative
  misc_feature (1)..(8): 2'-Omethyl derivative
  misc_feature (28)..(29): 2'-Omethyl derivative
  misc_feature (14)..(26): 2'-Omethyl derivative
  misc_feature (31)..(36): 2'-Omethyl derivative
ccauggccugaugaggccguuaggccgaaagacgcun

SEQ ID NO: 9614 - RNA, 37 nt, Artificial Sequence
  misc_feature (37)..(37): n is inverted deoxyabasic
  misc_feature (1)..(8): 2'-Omethyl derivative
  misc_feature (31)..(36): 2'-Omethyl derivative
  misc_feature (28)..(29): 2'-Omethyl derivative
  misc_feature (14)..(26): 2'-Omethyl derivative
  misc_feature (12)..(12): 2'-deoxy-2'-amino derivative
  misc_feature (1)..(3): phosphorothioate linkage
  misc_feature (9)..(9): 2'-deoxy-2'-amino derivative
gcugcaccugaugaggccguuaggccgaaacacucan

SEQ ID NO: 9615 - RNA, 37 nt, Artificial Sequence
  misc_feature (37)..(37): n is inverted deoxyabasic
  misc_feature (1)..(8): 2'-Omethyl derivative
  misc_feature (31)..(36): 2'-Omethyl derivative
  misc_feature (28)..(29): 2'-Omethyl derivative
  misc_feature (14)..(26): 2'-Omethyl derivative
  misc_feature (12)..(12): 2'-deoxy-2'-amino derivative
  misc_feature (9)..(9): 2'-deoxy-2'-amino derivative
  misc_feature (1)..(3): phosphorothioate linkage
agaccaccugaugaggccguuaggccgaaauggcucn

SEQ ID NO: 9616 - RNA, 37 nt, Artificial Sequence
  misc_feature (37)..(37): n is inverted deoxyabasic
  misc_feature (1)..(8): 2'-Omethyl derivative
  misc_feature (31)..(36): 2'-Omethyl derivative
  misc_feature (28)..(29): 2'-Omethyl derivative
  misc_feature (14)..(26): 2'-Omethyl derivative
  misc_feature (12)..(12): 2'-deoxy-2'-amino derivative
  misc_feature (9)..(9): 2'-deoxy-2'-amino derivative
  misc_feature (1)..(3): phosphorothioate linkage
uuccgcacugaugaggccguuaggccgaaaccacuan

SEQ ID NO: 9617 - RNA, 37 nt, Artificial Sequence
  misc_feature (37)..(37): n is inverted deoxyabasic
  misc_feature (1)..(8): 2'-Omethyl derivative
  misc_feature (31)..(36): 2'-Omethyl derivative
  misc_feature (28)..(29): 2'-Omethyl derivative
  misc_feature (14)..(26): 2'-Omethyl derivative
  misc_feature (12)..(12): 2'-deoxy-2'-amino derivative
  misc_feature (9)..(9): 2'-deoxy-2'-amino derivative
  misc_feature (1)..(3): phosphorothioate linkage
uccggugcugaugaggccguuaggccgaaacucaccn

SEQ ID NO: 9618 - RNA, 37 nt, Artificial Sequence
  misc_feature (37)..(37): n is inverted deoxyabasic
  misc_feature (1)..(8): 2'-Omethyl derivative
  misc_feature (31)..(36): 2'-Omethyl derivative
  misc_feature (28)..(29): 2'-Omethyl derivative
  misc_feature (14)..(26): 2'-Omethyl derivative
  misc_feature (12)..(12): 2'-deoxy-2'-amino derivative
  misc_feature (9)..(9): 2'-deoxy-2'-amino derivative
  misc_feature (1)..(3): phosphorothioate linkage
aagaaagcugaugaggccguuaggccgaaacccggun

SEQ ID NO: 9619 - RNA, 37 nt, Artificial Sequence
  misc_feature (37)..(37): n is inverted deoxyabasic
  misc_feature (1)..(8): n is inverted deoxyabasic
  misc_feature (31)..(36): 2'-Omethyl derivative
  misc_feature (28)..(29): n is inverted deoxyabasic
  misc_feature (14)..(26): 2'-Omethyl derivative
  misc_feature (12)..(12): 2'-deoxy-2'-amino derivative
  misc_feature (9)..(9): 2'-deoxy-2'-amino derivative
  misc_feature (1)..(3): phosphorothioate linkage
uccaagacugaugaggccguuaggccgaaaggacccn

SEQ ID NO: 9620 - RNA, 37 nt, Artificial Sequence
  misc_feature (37)..(37): n is inverted deoxyabasic
  misc_feature (1)..(8): 2'-Omethyl derivative
  misc_feature (31)..(36): 2'-Omethyl derivative
  misc_feature (28)..(29): 2'-Omethyl derivative
  misc_feature (14)..(26): 2'-Omethyl derivative
  misc_feature (12)..(12): 2'-deoxy-2'-amino derivative
  misc_feature (9)..(9): 2'-deoxy-2'-amino derivative
  misc_feature (1)..(3): phosphorothioate linkage
auccaagcugaugaggccguuaggccgaaaaggaccn

SEQ ID NO: 9621 - RNA, 37 nt, Artificial Sequence
  misc_feature (37)..(37): n is inverted deoxyabasic
  misc_feature (1)..(8): 2'-Omethyl derivative
  misc_feature (31)..(36): 2'-Omethyl derivative
  misc_feature (28)..(29): 2'-Omethyl derivative
  misc_feature (14)..(26): 2'-Omethyl derivative
  misc_feature (12)..(12): 2'-deoxy-2'-amino derivative
  misc_feature (9)..(9): 2'-deoxy-2'-amino derivative
  misc_feature (1)..(3): phosphorothioate linkage
cuuucgccugaugaggccguuaggccgaaacccaacn

SEQ ID NO: 9622 - RNA, 37 nt, Artificial Sequence
  misc_feature (37)..(37): n is inverted deoxyabasic
  misc_feature (1)..(8): 2'-Omethyl derivative
  misc_feature (31)..(36): 2'-Omethyl derivative
  misc_feature (28)..(29): 2'-Omethyl derivative
  misc_feature (14)..(26): 2'-Omethyl derivative
  misc_feature (12)..(12): 2'-deoxy-2'-amino derivative
  misc_feature (9)..(9): 2'-deoxy-2'-amino derivative
  misc_feature (1)..(3): phosphorothioate linkage
guaccaccugaugaggccguuaggccgaaaggccuun

SEQ ID NO: 9623 - RNA, 37 nt, Artificial Sequence
  misc_feature (37)..(37): n is inverted deoxyabasic
  misc_feature (1)..(8): 2'-Omethyl derivative
  misc_feature (31)..(36): 2'-Omethyl derivative
  misc_feature (28)..(29): 2'-Omethyl derivative
  misc_feature (14)..(26): 2'-Omethyl derivative
  misc_feature (12)..(2): 2'-deoxy-2'-amino derivative
  misc_feature (9)..(9): 2'-deoxy-2'-amino derivative
  misc_feature (1)..(3): phosphorothioate linkage
cacucgccugaugaggccguuaggccgaaagcacccn

SEQ ID NO: 9624 - RNA, 37 nt, Artificial Sequence
  misc_feature (37)..(37): n is inverted deoxyabasic
  misc_feature (1)..(8): 2'-Omethyl derivative
  misc_feature (31)..(36): 2'-Omethyl derivative
  misc_feature (28)..(29): 2'-Omethyl derivative
  misc_feature (14)..(26): 2'-Omethyl derivative
  misc_feature (12)..(12): 2'-deoxy-2'-amino derivative
  misc_feature (9)..(9): 2'-deoxy-2'-amino derivative
  misc_feature (1)..(3): phosphorothioate linkage
ucuacgacugaugaggccguuaggccgaaaccucccn

SEQ ID NO: 9625 - RNA, 37 nt, Artificial Sequence
  misc_feature (37)..(37): n is inverted deoxyabasic
  misc_feature (1)..(8): 2'-Omethyl derivative
  misc_feature (31)..(36): 2'-Omethyl derivative
  misc_feature (28)..(29): 2'-Omethyl derivative
  misc_feature (14)..(26): 2'-Omethyl derivative
  misc_feature (12)..(12): 2'-deoxy-2'-amino derivative
  misc_feature (9)..(9): 2'-deoxy-2'-amino derivative
  misc_feature (1)..(3): phosphorothioate linkage
cacgguccugaugaggccguuaggccgaaacgagacn

SEQ ID NO: 9626 - RNA, 37 nt, Artificial Sequence
  misc_feature (37)..(37): n is inverted deoxyabasic
  misc_feature (1)..(8): 2'-Omethyl derivative
  misc_feature (31)..(36): 2'-Omethyl derivative
  misc_feature (28)..(29): 2'-Omethyl derivative
  misc_feature (14)..(26): 2'-Omethyl derivative
  misc_feature (12)..(12): 2'-deoxy-2'-amino derivative
  misc_feature (9)..(9): 2'-deoxy-2'-amino derivative
  misc_feature (1)..(3): phosphorothioate linkage
cuuaggucuagugaggccguuaggccgauaguucucn

SEQ ID NO: 9627 - RNA, 37 nt, Artificial Sequence
  misc_feature (37)..(37): n is inverted deoxyabasic
  misc_feature (1)..(8): n is inverted deoxyabasic
  misc_feature (31)..(36): 2'-Omethyl derivative
  misc_feature (28)..(29): 2'-Omethyl derivative
  misc_feature (14)..(26): 2'-Omethyl derivative
  misc_feature (12)..(12): 2'-deoxy-2'-amino derivative
  misc_feature (9)..(9): 2'-deoxy-2'-amino derivative
  misc_feature (1)..(3): phosphorothioate linkage
ucugccgcuagugaggccguuaggccgauagugaccn

SEQ ID NO: 9628 - RNA, 37 nt, Artificial Sequence
  misc_feature (37)..(37): n is inverted deoxyabasic
  misc_feature (1)..(8): 2'-Omethyl derivative
  misc_feature (31)..(36): 2'-Omethyl derivative
  misc_feature (28)..(29): 2'-Omethyl derivative
  misc_feature (14)..(26): 2'-Omethyl derivative
  misc_feature (12)..(12): 2'-deoxy-2'-amino derivative
  misc_feature (9)..(9): 2'-deoxy-2'-amino derivative
  misc_feature (1)..(3): phosphorothioate linkage
aacccugcuagugaggccguuaggccgauagcucgun

SEQ ID NO: 9629 - RNA, 37 nt, Artificial Sequence
  misc_feature (37)..(37): n is inverted deoxyabasic
  misc_feature (1)..(8): 2'-Omethyl derivative
  misc_feature (31)..(36): 2'-Omethyl derivative
  misc_feature (28)..(29): 2'-Omethyl derivative
  misc_feature (14)..(26): 2'-Omethyl derivative
  misc_feature (12)..(12): 2'-deoxy-2'-amino derivative
  misc_feature (9)..(9): 2'-deoxy-2'-amino derivative
  misc_feature (1)..(3): phosphorothioate linkage
aguagaacuagugaggccguuaggccgauagcugccn

SEQ ID NO: 9630 - RNA, 37 nt, Artificial Sequence
  misc_feature (37)..(37): n is inverted deoxyabasic
  misc_feature (1)..(8): 2'-Omethyl derivative
  misc_feature (31)..(36): 2'-Omethyl derivative
  misc_feature (28)..(29): 2'-Omethyl derivative
  misc_feature (14)..(26): 2'-Omethyl derivative
  misc_feature (12)..(12): 2'-deoxy-2'-amino derivative
  misc_feature (9)..(9): 2'-deoxy-2'-amino derivative
  misc_feature (1)..(3): phosphorothioate linkage
gauuccacuagugaggccguuaggccgauacgcgacn

SEQ ID NO: 9631 - RNA, 37 nt, Artificial Sequence
  misc_feature (37)..(37): n is inverted deoxyabasic
  misc_feature (1)..(8): 2'-Omethyl derivative
  misc_feature (31)..(36): 2'-Omethyl derivative
  misc_feature (28)..(29): 2'-Omethyl derivative
  misc_feature (14)..(26): 2'-Omethyl derivative
  misc_feature (12)..(12): 2'-deoxy-2'-amino derivative
  misc_feature (9)..(9): 2'-deoxy-2'-amino derivative
  misc_feature (1)..(3): phosphorothioate linkage
gccauuccuagugaggccguuaggccgauaucuggcn

SEQ ID NO: 9632 - RNA, 37 nt, Artificial Sequence
  misc_feature (37)..(37): n is inverted deoxyabasic
  misc_feature (1)..(8): 2'-Omethyl derivative
  misc_feature (31)..(36): 2'-Omethyl derivative
  misc_feature (28)..(29): 2'-Omethyl derivative
  misc_feature (14)..(26): 2'-Omethyl derivative
  misc_feature (12)..(12): 2'-deoxy-2'-amino derivative
  misc_feature (9)..(9): 2'-deoxy-2'-amino derivative
  misc_feature (1)..(3): phosphorothioate linkage
ccaggcucuagugaggccguuaggccgauaaugcgcn

SEQ ID NO: 9633 - RNA, 37 nt, Artificial Sequence
  misc_feature (37)..(37): n is inverted deoxyabasic
  misc_feature (1)..(8): 2'-Omethyl derivative
  misc_feature (31)..(36): 2'-Omethyl derivative
  misc_feature (28)..(29): 2'-Omethyl derivative
  misc_feature (14)..(26): 2'-Omethyl derivative
  misc_feature (12)..(12): 2'-deoxy-2'-amino derivative
  misc_feature (9)..(9): 2'-deoxy-2'-amino derivative
  misc_feature (1)..(3): phosphorothioate linkage
uccaagacuagugacgccguuaggcggaaaggacccn

SEQ ID NO: 9634 - RNA, 37 nt, Artificial Sequence
  misc_feature (37)..(37): n is inverted deoxyabasic
  misc_feature (1)..(8): 2'-Omethyl derivative
  misc_feature (31)..(36): 2'-Omethyl derivative
  misc_feature (28)..(29): 2'-Omethyl derivative
  misc_feature (14)..(26): 2'-Omethyl derivative
  misc_feature (12)..(12): 2'-deoxy-2'-amino derivative
  misc_feature (9)..(9): 2'-deoxy-2'-amino derivative
  misc_feature (1)..(3): phosphorothioate linkage
agacuaccuagugacgccguuaggcggaaacccgagn

SEQ ID NO: 9635 - RNA, 37 nt, Artificial Sequence
  misc_feature (37)..(37): n is inverted deoxyabasic
  misc_feature (1)..(8): 2'-Omethyl derivative
  misc_feature (31)..(36): 2'-Omethyl derivative
  misc_feature (28)..(29): 2'-Omethyl derivative
  misc_feature (14)..(26): 2'-Omethyl derivative
  misc_feature (12)..(12): 2'-deoxy-2'-amino derivative
  misc_feature (9)..(9): 2'-deoxy-2'-amino derivative
  misc_feature (1)..(3): phosphorothioate linkage
cacgguccuagugacgccguuaggcggaaacgagacn

SEQ ID NO: 9636 - RNA, 37 nt, Artificial Sequence
  misc_feature (37)..(37): n is inverted deoxyabasic
  misc_feature (1)..(8): 2'-Omethyl derivative
  misc_feature (31)..(36): 2'-Omethyl derivative
  misc_feature (28)..(29): 2'-Omethyl derivative
  misc_feature (14)..(26): 2'-Omethyl derivative
  misc_feature (12)..(12): 2'-deoxy-2'-amino derivative
  misc_feature (9)..(9): 2'-deoxy-2'-amino derivative
  misc_feature (1)..(3): phosphorothioate linkage
gcuccgacuagugacgccguuaggcggaaagacacgn

SEQ ID NO: 9637 - DNA, 20 bp, Artificial Sequence
  misc_feature (1)..(19): phosphorothioate linkage
gtgctcatggtgcacggtct

SEQ ID NO: 9638 - DNA, 20 bp, Artificial Sequence
  misc_feature (1)..(19): phosphorothioate linkage
tgatcaggtctgctgcgtgc

SEQ ID NO: 9639 - DNA, 20 bp, Artificial Sequence
  misc_feature (1)..(19): phosphorothioate linkage
tgatcaggtctgctgcatgc

SEQ ID NO: 9640 - RNA, 16 nt, Artificial Sequence
  misc_feature (16)..(16): n is inverted deoxyabasic
uccucgucucucagcn

SEQ ID NO: 9641 - RNA, 16 nt, Artificial Sequence
  misc_feature (16)..(16): n is inverted deoxyabasic
ggcacauuaacaggan

SEQ ID NO: 9642 - RNA, 16 nt, Artificial Sequence
  misc_feature (16)..(16): n is inverted deoxyabasic
gcauccucuccuuccn

SEQ ID NO: 9643 - RNA, 16 nt, Artificial Sequence
  misc_feature (16)..(16): n is inverted deoxyabasic
gaggaguacguggagn

SEQ ID NO: 9644 - RNA, 16 nt, Artificial Sequence
  misc_feature (16)..(16): n is inverted deoxyabasic
gcgcauuuucacuccn

SEQ ID NO: 9645 - RNA, 16 nt, Artificial Sequence
  misc_feature (16)..(16): n is inverted deoxyabasic
gacucguaggcucgcn

SEQ ID NO: 9646 - RNA, 16 nt, Artificial Sequence
  misc_feature (16)..(16): n is inverted deoxyabasic
ucagugucuuccagcn

SEQ ID NO: 9647 - RNA, 16 nt, Artificial Sequence
  misc_feature (16)..(16): n is inverted deoxyabasic
ccucucucucauccun

SEQ ID NO: 9648 - RNA, 16 nt, Artificial Sequence
  misc_feature (16)..(16): n is inverted deoxyabasic
uccacguacuccucan

SEQ ID NO: 9649 - RNA, 16 nt, Artificial Sequence
  misc_feature (16)..(16): n is inverted deoxyabasic
cgugcauauccagucn

SEQ ID NO: 9650 - RNA, 16 nt, Artificial Sequence
  misc_feature (16)..(16): n is inverted deoxyabasic
uuucucuaucuuccun

SEQ ID NO: 9651 - RNA, 16 nt, Artificial Sequence
  misc_feature (16)..(16): n is inverted deoxyabasic
cuuccucgucucucan

SEQ ID NO: 9652 - RNA, 16 nt, Artificial Sequence
  misc_feature (16)..(16): n is inverted deoxyabasic
cucagcuguucaccun

SEQ ID NO: 9653 - RNA, 16 nt, Artificial Sequence
  misc_feature (16)..(16): n is inverted deoxyabasic
agccuccaucaccagn

SEQ ID NO: 9654 - RNA, 16 nt, Artificial Sequence
  misc_feature (16)..(16): n is inverted deoxyabasic
ucaacgcauacaccan

SEQ ID NO: 9655 - RNA, 16 nt, Artificial Sequence
  misc_feature (16)..(16): n is inverted deoxyabasic
ucgccgcguccucuun

SEQ ID NO: 9656 - RNA, 16 nt, Artificial Sequence
  misc_feature (16)..(16): n is inverted deoxyabasic
cgccuucaucuccuun

SEQ ID NO: 9657 - RNA, 16 nt, Artificial Sequence
  misc_feature (16)..(16): n is inverted deoxyabasic
cucucucauccuccun

SEQ ID NO: 9658 - RNA, 16 nt, Artificial Sequence
  misc_feature (16)..(16): n is inverted deoxyabasic
ccuccacguacuccun

SEQ ID NO: 9659 - RNA, 16 nt, Artificial Sequence
  misc_feature (16)..(16): n is inverted deoxyabasic
ccuccaaaucacaacn

SEQ ID NO: 9660 - RNA, 16 nt, Artificial Sequence
  misc_feature (16)..(16): n is inverted deoxyabasic
ucucagugucuuccan

SEQ ID NO: 9661 - RNA, 16 nt, Artificial Sequence
  misc_feature (16)..(16): n is inverted deoxyabasic
uguauaugccucuccn

SEQ ID NO: 9662 - RNA, 16 nt, Artificial Sequence
  misc_feature (16)..(16): n is inverted deoxyabasic
accgugugccuuagan

SEQ ID NO: 9663 - RNA, 16 nt, Artificial Sequence
  misc_feature (16)..(16): n is inverted deoxyabasic
guggagugagguggun

SEQ ID NO: 9664 - RNA, 16 nt, Artificial Sequence
  misc_feature (16)..(16): n is inverted deoxyabasic
acgaguugaaccugun

SEQ ID NO: 9665 - RNA, 16 nt, Artificial Sequence
  misc_feature (16)..(16): n is inverted deoxyabasic
ccugucugaccauccn

SEQ ID NO: 9666 - RNA, 16 nt, Artificial Sequence
  misc_feature (16)..(16): n is inverted deoxyabasic
uccuguugcuuuuccn

SEQ ID NO: 9667 - RNA, 16 nt, Artificial Sequence
  misc_feature (16)..(16): n is inverted deoxyabasic
uccucguguucuucun

SEQ ID NO: 9668 - RNA, 16 nt, Artificial Sequence
  misc_feature (16)..(16): n is inverted deoxyabasic
acaaagugcucguccn

SEQ ID NO: 9669 - RNA, 16 nt, Artificial Sequence
  misc_feature (16)..(16): n is inverted deoxyabasic
gccacuugaccuaccn

SEQ ID NO: 9670 - RNA, 16 nt, Artificial Sequence
  misc_feature (16)..(16): n is inverted deoxyabasic
cuuccucgucucucan

SEQ ID NO: 9671 - RNA, 16 nt, Artificial Sequence
  misc_feature (16)..(16): n is inverted deoxyabasic
cucagcuguucaccun

SEQ ID NO: 9672 - RNA, 16 nt, Artificial Sequence
  misc_feature (16)..(16): n is inverted deoxyabasic
uccuguugcuuuuccn

SEQ ID NO: 9673 - RNA, 16 nt, Artificial Sequence
  misc_feature (16)..(16): n is inverted deoxyabasic
uccucguguucuucun

SEQ ID NO: 9674 - RNA, 16 nt, Artificial Sequence
  misc_feature (16)..(16): n is inverted deoxyabasic
cacuccagucaacucn

SEQ ID NO: 9675 - RNA, 16 nt, Artificial Sequence
  misc_feature (16)..(16): n is inverted deoxyabasic
ucgccgcguccucuun

SEQ ID NO: 9676 - RNA, 16 nt, Artificial Sequence
  misc_feature (16)..(16): n is inverted deoxyabasic
ucucagugucuuccan

SEQ ID NO: 9677 - RNA, 16 nt, Artificial Sequence
  misc_feature (16)..(16): n is inverted deoxyabasic
ccuccacguacuccun

SEQ ID NO: 9678 - RNA, 16 nt, Artificial Sequence
  misc_feature (16)..(16): n is inverted deoxyabasic
uccacaugugcuucgn

SEQ ID NO: 9679 - RNA, 16 nt, Artificial Sequence
  misc_feature (16)..(16): n is inverted deoxyabasic
ucacgccgucuuccan

SEQ ID NO: 9680 - RNA, 16 nt, Artificial Sequence
  misc_feature (16)..(16): n is inverted deoxyabasic
cucuaucuuccucuun

SEQ ID NO: 9681 - RNA, 16 nt, Artificial Sequence
  misc_feature (16)..(16): n is inverted deoxyabasic
ucucagcuguucaccn

SEQ ID NO: 9682 - RNA, 16 nt, Artificial Sequence
  misc_feature (16)..(16): n is inverted deoxyabasic
uccucuccuuccucgn

SEQ ID NO: 9683 - RNA, 16 nt, Artificial Sequence
  misc_feature (16)..(16): n is inverted deoxyabasic
ucacagccuccaucan

SEQ ID NO: 9684 - RNA, 16 nt, Artificial Sequence
  misc_feature (16)..(16): n is inverted deoxyabasic
cuccacccuuccucan

SEQ ID NO: 9685 - RNA, 16 nt, Artificial Sequence
  misc_feature (16)..(16): n is inverted deoxyabasic
uggugucucagugucn

SEQ ID NO: 9686 - RNA, 16 nt, Artificial Sequence
  misc_feature (16)..(16): n is inverted deoxyabasic
cuucgccuucaucucn

SEQ ID NO: 9687 - RNA, 16 nt, Artificial Sequence
  misc_feature (16)..(16): n is inverted deoxyabasic
accucucucucauccn

SEQ ID NO: 9688 - RNA, 16 nt, Artificial Sequence
  misc_feature (16)..(16): n is inverted deoxyabasic
uucauccacugcacan

SEQ ID NO: 9689 - RNA, 16 nt, Artificial Sequence
  misc_feature (16)..(16): n is inverted deoxyabasic
caacagcaucauccan

SEQ ID NO: 9690 - RNA, 14 nt, artificial sequence
  misc_feature (1)..(5): n is any nucleotide, unknown or otherwise, including any modifica tion
  misc_feature (7)..(7): n is A, U or C
  misc_feature (8)..(14): n is any nucleotide, unknown or other, including any modification
nnnnncnnnnnnnn

SEQ ID NO: 9691 - RNA, 36 nt, artificial sequence
  misc_feature (1)..(7): n is any nucleotide, unknown or other, including any modification s
  misc_feature (8)..(8): 2'-Omethyl derivative
  misc_feature (9)..(9): 2'-C-allyl derivative
  misc_feature (12)..(12): 2'-Omethyl derivative
  misc_feature (14)..(15): 2'-Omethyl derivative
  misc_feature (16)..(25): n is any nucleotide, unknown or other, including any modification s
  misc_feature (26)..(26): 2'-Omethyl derivative
  misc_feature (28)..(29): 2'-Omethyl derivative
  misc_feature (31)..(35): n is any nucleotide, unknown or other, including any modification
  misc_feature (36)..(36): inverted deoxyabasic moiety
nnnnnnncugaugagnnnnnnnnnncgaagnnnnnn

SEQ ID NO: 9692 - RNA, 14 nt, artificial sequence
  misc_feature (1)..(5): n is any nucleotide, unknown or other, including any modification
  misc_feature (7)..(7): n is A, U, or C.
  misc_feature (8)..(14): n is any nucleotide, unknown or otherwise, including any modifica tion
nnnnncnnnnnnnn

SEQ ID NO: 9693 - RNA, 36 nt, artificial sequence
  misc_feature (1)..(7): n is any nucleotide, unknown or other, including any modification
  misc_feature (36)..(36): inverted deoxyabasic moiety
  misc_feature (8)..(8): 2'-Omethyl derivative
  misc_feature (9)..(9): 2'-C-allyl derivative
  misc_feature (12)..(12): 2'-Omethyl derivative
  misc_feature (14)..(15): 2'-Omethyl derivative
  misc_feature (16)..(25): n is any nucleotide, unknown or otherwise, including any modifica tion
  misc_feature (26)..(26): 2'-Omethyl derivative
  misc_feature (28)..(29): 2'-Omethyl derivative
  misc_feature (30)..(30): ribo inosine derivative
  misc_feature (31)..(35): n is any nucleotide, unknown or other, including any modification
nnnnnnncugaugagnnnnnnnnnncgaannnnnnn

SEQ ID NO: 9694 - RNA, 16 nt, artificial sequence
  misc_feature (1)..(9): n is any nucleotide, unknown or other, including any modification
  misc_feature (13)..(16): n is any nucleotide, unknown or other, including any modification
nnnnnnnnnugannnn

SEQ ID NO: 9695 - RNA, 37 nt, artificial sequence
  misc_feature (1)..(4): n is any nucleotide, unknown or other, including any modification
  misc_feature (2)..(3): phorphorothioate or phosphorodithioate linkage
  misc_feature (5)..(6): 2'-Omethyl derivative
  misc_feature (11)..(14): 2'-Omethyl derivative
  misc_feature (16)..(27): 2'-Omethyl derivative
  misc_feature (28)..(36): n is any nucleotide, unknown or other, including any modification
  misc_feature (37)..(37): inverted deoxyabasic moiety
nnnnuugauggcaugcacuaugcgcgannnnnnnnnn

SEQ ID NO: 9696 - RNA, 35 nt, artificial sequence
  misc_feature (1)..(4): phosphorothioate linkage
  misc_feature (22)..(22): n is G, 2'-Omethyl cytosine 2'-Omethyl adenosine, or 2'-Omethyl c ytosine 2'-Omethyl adenosine 2'-Omethyl adenosin
  misc_feature (1)..(7): 2'-Omethyl derivative
  misc_feature (9)..(15): 2'-Omethyl derivative
  misc_feature (19)..(19): 2'-Omethyl derivative
  misc_feature (21)..(21): 2'-Omethyl derivative
  misc_feature (23)..(23): 2'-Omethyl derivative
  misc_feature (26)..(26): 2'-Omethyl derivative
  misc_feature (28)..(35): 2'-Omethyl derivative
  misc_feature (17)..(17): 2'-deoxy-2'-amino derivative
  misc_feature (27)..(27): 2'-deoxy-2'-amino derivative
gugccuggccgaaaggcgaugnaggucugccgcgc

SEQ ID NO: 9697 - RNA, 15 nt, artificial sequence
  misc_feature (7)..(7): n is U or C
  misc_feature (9)..(9): n is U or C
gcgcggngnaggcac

SEQ ID NO: 9698 - RNA, 49 nt, artificial sequence
  misc_feature (1)..(8): 2'-Omethyl derivative
  misc_feature (12)..(21): 2'-Omethyl derivative
  misc_feature (32)..(37): 2'-Omethyl derivative
  misc_feature (44)..(48): 2'-Omethyl derivative
  misc_feature (49)..(49): inverted deoxyabasic moiety
  misc_feature (9)..(10): 2'-amino derivative
  misc_feature (22)..(26): 2'-amino derivative
  misc_feature (38)..(40): 2'-amino derivative
gugugcaaccggaggaaacucccuucaaggacgaaaguccgggacgggn

SEQ ID NO: 9699 - RNA, 16 nt, artificial sequence
  misc_feature: oligonucleotide substrate
gccguggguugcacac

SEQ ID NO: 9700 - DNA, 16 bp, artificial sequence
  misc_feature (1)..(1): n is A or G
nggctagctacaacga

SEQ ID NO: 9701 - RNA, 366 nt, artificial sequence
  misc_feature: HCV 5' UTR
gccagcccccgauugggggcgacacuccaccauagaucacuccccugugaggaacuacugucuucacgcagaaagcgucuagccauggcguuaguaugagugucgugcagccuccaggacccccccucccggggagagccauaguggucugcggaaccggugaguacaccggaauugccaggacgaccggguccuuucuuggaucaacccgcucaaugccuggagauuugggcgugcccccgcgagacugcuagccgaguaguguugggucgcgaaaggccuugugguacuccugauagggugcuugcgagugccccgggaggucucguagaccgugcaccaugagcacgaauccuaaaccucaaa

SEQ ID NO: 9702 - RNA, 13 nt, artificial sequence
  misc_feature (1)..(5): n is any nucleotide, unknown or otherwise, including any modifica tion
  misc_feature (7)..(13): n is any nucleotide, unknown or otherwise, including any modifica tion
nnnnnunnnnnnn

SEQ ID NO: 9703 - RNA, 35 nt, artificial sequence
  misc_feature (1)..(4): phosphorothioate linkage
  misc_feature (35)..(35): n is inverted deoxyabasic moiety
  misc_feature (30)..(34): n is any nucleotide including any chemical modifications
  misc_feature (13)..(25): 2'-Omethyl derivative
  misc_feature (11)..(11): 2'-deoxy, 2'-amino derivative
  misc_feature (8)..(8): 2'-deoxy, 2'-amino derivative
  misc_feature (7)..(7): 2'-Omethyl derivative
  misc_feature (1)..(6): n is any nucleotide, including any chemical modifications
  misc_feature (27)..(28): 2'-Omethyl derivative
nnnnnncugaugaggccguuaggccgaaannnnnn
